(19) United States
(12) Patent Application Publication
(10) Pub. No.: US 2021/0024971 A1
(43) Pub. Date: Jan. 28, 2021

(54) METHODS FOR PRODUCING, DISCOVERING, AND OPTIMIZING LASSO PEPTIDES

(71) Applicant: Lassogen, Inc., San Diego, CA (US)

(72) Inventors: Mark J. Burk, San Diego, CA (US); I-Hsiung Brandon Chen, San Diego, CA (US)

(21) Appl. No.: 17/043,605

(22) PCT Filed: Mar. 29, 2019
(86) PCT No.: PCT/US2019/024811

§ 371 Date: Sep. 29, 2020

Related U.S. Application Data
(60) Provisional application No. 62/652,213, filed on Apr. 3, 2018.
(60) Provisional application No. 62/651,028, filed on Mar. 30, 2018.

(51) Int. Cl. C12P 21/02; C07K 14/47; G01N 33/68; C12N 15/10; C12N 9/52

(52) U.S. Cl. CPC C12P 21/02; C07K 14/4723; G01N 2500/10; C12N 15/1089; C12N 9/52; G01N 33/6845

(57) ABSTRACT

Provided herein are lasso peptides and methods and systems of synthesizing lasso peptides, methods of discovering lasso peptides, methods of optimizing the properties of lasso peptides, and methods of using lasso peptides.

[0001] This application claims the benefit of priority to U.S. Provisional Patent Application No. 62/651,028 filed Mar. 30, 2018 and U.S. Provisional Patent Application No. 62/652,213 filed Apr. 3, 2018, the disclosure of each of which is incorporated by reference herein in its entirety.

[0002] The instant application contains a Sequence Listing which has been submitted electronically in ASCII format and is hereby incorporated by reference in its entirety. Said ASCII copy, created on Mar. 28, 2019, is named 12956-445-228_SL.txt and is 1,681,979 bytes in size.

### 1. FIELD

[0003] The field of invention covers methods for synthesis, discovery, and optimization of lasso peptides, and uses thereof.

### 2. BACKGROUND

[0004] Peptides serve as useful tools and leads for drug development since they often combine high affinity and specificity for their target receptor with low toxicity. In addition, peptides are potentially much safer drugs since degradation in the body affords non-toxic, nutritious amino acids. (Sato, A K., et al., Curr. Opin. Biotechnol, 2006, 17, 638-642; Antosova, Z., et al., Trends Biotechnol., 2009, 27, 628-635). However, their clinical use as efficacious drugs has been limited due to undesirable physicochemical and pharmacokinetic properties, including poor solubility and cell permeability, low bioavailability, and instability due to rapid proteolytic degradation under physiological conditions (Antosova, Z., et al., Trends Biotechnol, 2009, 27, 628-635).

[0005] Peptides with a knotted topology may be used as stable molecular frameworks for potential therapeutic applications. For example, ribosomally assembled natural peptides sharing the cyclic cysteine knot (CCK) motif, have been recently characterized (Weidmann, J.; Craik, D. J., J. Experimental Bot., 2016, 67, 4801-4812; Burman, R, et al., J. Nat. Prod. 2014, 77, 724-736; Reinwarth, M., et al., Molecules, 2012, 17, 12533-12552; Lewis, R J., et al., Pharmacol. Rev., 2012, 64, 259-298). These knotted peptides require the formation of three disulfide bonds to hold them into a defined conformation. However, these knotted peptide scaffolds are not readily accessible by genetic manipulation and heterologous production in cells and discovery relies on traditional extraction and fractionation methods that are slow and costly. Moreover, their production relies either on solid phase peptide synthesis (SPPS) or on expressed protein ligation (EPL) methods to generate the circular peptide backbone, followed by oxidative folding to form the correct three disulfide bonds required for the knotted structure (Craik, D. J., et al., Cell Mol. Lift Sci. 2010, 67, 9-16; Benade, L. & Camarero, J. A. Cell Mol. Lift Sci., 2009, 66, 3909-22).

[0006] Thus, there exists a need for new classes of peptide-based therapeutic compounds with readily available methods for their discovery, genetic manipulation and optimization, cost-effective production, and high-throughput screening. The inventions described herein meet these needs in the field.

### 3. SUMMARY

[0007] Provided herein are lasso peptides and methods and systems of synthesizing lasso peptides, methods of discovering lasso peptides, methods of optimizing the properties of lasso peptides, and methods of using lasso peptides.

[0008] In some embodiments, provided herein are methods for production and optional screening of one or more lasso peptides (LPs) or one or more lasso peptide analogs or their combination using a cell-free biosynthesis (CFB) reaction mixture, comprising the steps: (i) combining and contacting one or more lasso precursor peptides (LPP), one or more lasso core peptide (LCP), or their combination, with a lasso cyclase (LCase) enzyme, and optionally with a lasso peptidase (LPase) enzyme when the one or more LPP is present, in a CFB reaction mixture; (ii) synthesizing the one or more lasso peptides or LP analogs in the CFB reaction mixture, and (iii) optionally screening the one or more lasso peptides or LP analogs for one or more desired properties or activities by (1) screening the CFB reaction mixture, or (2) screening the partially purified or substantially purified lasso peptide or LP analog.

[0009] In some embodiments, the method further comprises: (i) obtaining at least one of the LPP, the LCP, the LPase or the LCase by chemical synthesis or by biological synthesis, optionally; (ii) where the biological synthesis comprises transcription and/or translation of a gene or oligonucleotide encoding the LCP, a gene or oligonucleotide encoding the LPP, a gene or oligonucleotide encoding the LPAse, or a gene or oligonucleotide encoding the LCase, and optionally where the transcription and/or translation of these genes or oligonucleotides occurs in the CFB reaction mixture.

[0010] In some embodiments, the method further comprising: (i) designing the LP gene or oligonucleotide, the LPP gene or oligonucleotide, the LPase gene or oligonucleotide, or the LCase gene or oligonucleotide for transcription and/or translation in the CFB reaction mixture, and optionally; where the designing uses genetic sequences for the lasso precursor peptide gene, the lasso core peptide gene, the lasso peptidase gene, and/or the lasso cyclase gene, and optionally where the genetic sequences are identified using a genome-mining algorithm, and optionally where the genome-mining algorithm is anti-SMASH, BAGEL3, or RODEO.

[0011] In some embodiments, in any of the preceding methods, wherein the combining and contacting comprises a minimal set of lasso peptide biosynthesis components in the CFB reaction mixture, where the minimal set of lasso peptide biosynthesis components comprises the one or more lasso precursor peptides (A), one lasso peptidase (B), and one lasso cyclase (C), each of which may be independently generated by the biological and/or chemical synthesis methods, or the minimal set optionally further comprises the one or more lasso core peptide and one lasso cyclase, each of which may be independently generated by the biological and/or the chemical synthesis methods.

[0012] In some embodiments, in any preceding methods, wherein the CFB reaction mixture contains a minimal set of lasso peptide biosynthesis components and comprises one or more of: (i) a substantially isolated lasso precursor peptide or lasso precursor peptide fusion, a substantially isolated lasso cyclase enzyme or fusion thereof, and a substantially isolated lasso peptidase enzyme or fusion thereof, or (ii) oligonucleotides (linear or circular constructs of DNA or RNA) that encode for a lasso precursor peptide or a fusion thereof, a substantially isolated lasso cyclase enzyme or fusion thereof, and a substantially isolated lasso peptidase enzyme or fusion thereof, or (iii) a substantially isolated precursor peptide or fusion thereof, an oligonucleotide that encodes for a lasso cyclase or fusion thereof, and an oligonucleotide that encodes for a lasso peptidase or fusion thereof, or (iv) an oligonucleotide that encodes for a precursor peptide, an oligonucleotide that encodes for a lasso cyclase or fusion thereof, and an oligonucleotide that encodes for a lasso peptidase, or fusion thereof, or (v) a substantially isolated lasso core peptide or fusion thereof and a substantially isolated lasso cyclase or fusion thereof, or (vi) an oligonucleotide that encodes for a lasso core peptide and a substantially isolated lasso cyclase or fusion thereof, or (vii) an oligonucleotide that encodes for a lasso core peptide and an oligonucleotide that encodes for a lasso cyclase or fusion thereof.

[0013] In some embodiments, in any preceding methods, the lasso precursor (A) is a peptide or polypeptide produced chemically or biologically, with a sequence corresponding to the even number of SEQ ID Nos: 1-2630 or a sequence with at least 30% identity of the even number of SEQ ID Nos: 1-2630, or a protein or peptide fusion or portion thereof. In any preceding methods, wherein the lasso peptidase (B) is an enzyme produced chemically or biologically, with a sequence corresponding to peptide Nos 1316-2336 or a natural sequence with at least 30% identity of peptide Nos: 1316-2336.

[0014] In some embodiments, in any preceding methods, wherein the lasso cyclase (C) is an enzyme produced chemically or biologically with a sequence corresponding to peptide Nos: 2337-3761 or a natural sequence with at least 30% identity of peptide Nos: 2337-3761.

[0015] In some embodiments, in any preceding methods, wherein the CFB reaction mixture further comprises one or more RiPP recognition elements (RREs) or the genes encoding such RREs. In some embodiments, in any preceding methods, wherein the RiPP recognition elements (RREs) are proteins produced chemically or biologically with a natural sequence corresponding to peptide Nos: 3762-4593 or a natural sequence of at least 30% identity of peptide Nos: 3762-4593.

[0016] In some embodiments, in any preceding methods, wherein the CFB reaction mixture contains a lasso peptidase or a lasso cyclase that is fused at the N- or C-terminus with one or more RiPP recognition elements (RREs).

[0017] In some embodiments, in any preceding methods, wherein the one or more lasso peptide or the one or more lasso peptide analog or their combination is produced.

[0018] In some embodiments, in any preceding methods, wherein the one or more lasso peptides or the one or more lasso peptide analogs or their combination is produced and screened.

[0019] In some embodiments, in any preceding methods, wherein the one or more lasso core peptide or lasso peptide or lasso peptide analogs, containing no fusion partners, comprises at least eleven amino acid residues and a maximum of about fifty amino acid residues.

[0020] In some embodiments, in any preceding methods, wherein the CFB reaction mixture (or system) comprises a whole cell extract, a cytoplasmic extract, a nuclear extract, or any combination thereof, wherein each are independently derived from a prokaryotic or a eukaryotic cell.

[0021] In some embodiments, in any preceding methods, wherein the CFB reaction mixture comprises substantially isolated individual transcription and/or translation components derived from a prokaryotic or a eukaryotic cell.

[0022] In some embodiments, in any preceding methods, wherein the CFB reaction mixture further comprises one or more lasso peptide modifying enzymes or genes that encode the lasso peptide modifying enzymes, and optionally wherein the one or more lasso peptide modifying enzymes is independently selected from the group consisting of N-methyltransferases, O-methyltransferases, biotin ligases, glycosyltransferases, esterases, acylases, acyltransferases, aminotransferases, amidases, hydroxylases, dehydrogenases, halogenases, kinases, RiPP heterocyclases, RiPP cyclodehydratases, and prenyltransferases.

[0023] In some embodiments, in any preceding methods, wherein the CFB reaction mixture comprises a buffered solution comprising salts, trace metals, ATP and co-factors required for activity of one or more of the LPase, the LCase, an enzyme required for the translation, an enzyme required for the transcription, or a lasso peptide modifying enzyme.

[0024] In some embodiments, in any preceding methods, wherein the CFB reaction mixture comprises the substantially isolated lasso precursor peptides or lasso core peptide, or fusions thereof, combined and contacted with the substantially isolated enzymes that include a lasso cyclase, and optionally a lasso peptidase, or fusions thereof, in a buffered solution containing salts, trace metals, ATP, and co-factors required for enzymatic activity

[0025] In some embodiments, in any preceding methods, wherein the CFB system is used to facilitate the discovery of new lasso peptides from Nature, further comprising the steps: (i) analyzing bacterial genome sequence data and predict the sequence of lasso peptide gene clusters and associated genes, optionally using the genome-mining algorithm, optionally where the genome-mining algorithm is anti-SMASH, BAGEL3, or RODEO, (ii) cloning or synthesizing the minimal set of lasso peptide biosynthesis genes (A-C) or oligonucleotides containing these gene sequences, and (iii) synthesizing known or previously undiscovered natural lasso peptides using the cell-free biosynthesis methods described herein.

[0026] In some embodiments, in any preceding methods, wherein the one or more lasso peptides, the one or more lasso peptide analogs, or their combination comprises a library containing at least one lasso peptide analog in which at least one amino acid residue is changed from its natural residue.

[0027] In some embodiments, in any preceding methods, wherein the one or more lasso peptides, the one or more lasso peptide analogs, or their combination comprises a library wherein substantially all or all amino acid mutational variants of the lasso core peptide or the lasso precursor peptide, optionally where the amino acid mutational variants of the lasso core peptide or the lasso precursor peptide are obtained by biological or chemical synthesis, and optionally where the biological synthesis uses a gene library encoding substantially all or all genetic mutational variants of the lasso core peptide or the lasso precursor peptide, optionally where the gene library is rationally designed, and optionally where the mutational variants of the lasso core peptide or the lasso precursor peptide are converted to lasso peptide mutational variants, and optionally where the lasso peptide mutational variants are screened for desired properties or activities.

[0028] In some embodiments, a library of lasso peptides or lasso peptide analogs is created by (1) directed evolution technologies, or (2) chemical synthesis of lasso precursor peptide or lasso core peptide variants and enzymatic conversion to lasso peptide mutational variants, or (3) display technologies, optionally wherein the display technologies are in vitro display technologies, and optionally wherein in vitro display technologies are RNA or DNA display technologies, or combination thereof, and optionally where the library of lasso peptides or lasso peptide analogs is screened for desired properties or activities.

[0029] In some embodiments, provided herein is a lasso peptide library, a LP analog library or a combination thereof, comprising at least two lasso peptides, at least two lasso peptide analogs, or at least one lasso peptide and one lasso peptide analog, which may be pooled together in one vessel or where each member is separated into individual vessels (e.g., wells of a plate), and wherein the library members are isolated and purified, or partially isolated and purified, or substantially isolated and purified, or optionally wherein the library members are contained in a CFB reaction mixture.

[0030] In some embodiments, the library is created using the system and methods provided herein.

[0031] In some embodiments, the CFB reaction mixture useful for the synthesis of lasso peptides and lasso peptide analogs comprising one or more cell extracts or cell-free reaction media that support and facilitate a biosynthetic process wherein one or more lasso peptides or lasso peptide analogs is formed by converting one or more lasso precursor peptides or one or more lasso core peptides through the action of a lasso cyclase, and optionally a lasso peptidase, and optionally wherein transcription and/or translation of oligonucleotide inputs occurs to produce the lasso cyclase, lasso peptidase, lasso precursor peptides, and/or lasso core peptides.

[0032] In some embodiments, the CFB reaction mixture further comprising a supplemented cell extract.

[0033] In some embodiments, the CFB reaction mixture also comprises the oligonucleotides, genes, biosynthetic gene clusters, enzymes, proteins, and final peptide products, including lasso precursor peptides, lasso core peptides, lasso peptides, or lasso peptide analogs that result from performing a CFB reaction.

[0034] In some embodiments, provided herein are a kit for the production of lasso peptides and/or lasso peptide analogs according to any of the preceding methods comprising a CFB reaction mixture, a cell extract or cell extracts, cell extract supplements, a lasso precursor peptide or gene or a library of such, a lasso core peptide or gene or a library of such, a lasso cyclase or gene or genes, and/or a lasso peptidase or gene, along with information about the contents and instructions for producing lasso peptides or lasso peptide analogs.

[0035] In some embodiments, provided herein is a lasso peptidase library comprising at least two lasso peptidases, wherein the lasso peptidases are encoded by genes of a same organism or encoded by genes of different organisms. In some embodiments, each lasso peptidase of the at least two lasso peptidases comprises an amino acid sequence selected from peptide Nos: 1316-2336, or a natural sequence with at least 30% identity of peptide Nos: 1316-2336. In some embodiments, the library is produced by a cell-flee biosynthesis system.

[0036] In some embodiments, provided herein is a lasso cyclase library comprising at least two lasso cyclases, wherein the lasso cyclases are encoded by genes of a same organism or encoded by genes of different organisms. In some embodiments, each lasso peptidase of the at least two lasso cyclases comprises an amino acid sequence selected from peptide Nos: 2337-3761, or a natural sequence having at least 30% identity of peptide Nos: 2337-3761. In some embodiments, the natural sequence is identified using a genome mining tool as described herein. In some embodiments, the lasso cyclase library is produced by a cell-flee biosynthesis system.

[0037] In some embodiments, provided herein is a cell flee biosynthesis (CFB) system for producing one or more lasso peptide or lasso peptide analogs, wherein the CFB system comprises at least one component capable of producing one or more lasso precursor peptide. In some embodiments, the CFB system further comprises at least one component capable of producing one or more lasso peptidase. In some embodiments, the CFB system further comprises at least one component capable of producing one or more lasso cyclase. In some embodiments, the at least one component capable of producing the one or more lasso precursor peptide comprises the one or more lasso precursor peptide. In some embodiments, the one or more lasso precursor peptide is synthesized outside the CFB system.

[0038] In some embodiments, the one or more lasso precursor peptide is isolated from a naturally-occurring microorganism.

[0039] In some embodiments, the one or more lasso precursor peptide is isolated from a plurality naturally-occurring microorganisms.

[0040] In some embodiments, the lasso precursor peptide is isolated as a cell extract of the naturally occurring microorganism.

[0041] In some embodiments, the at least one component capable of producing the one or more lasso precursor peptide comprises a polynucleotide encoding for the one or more lasso precursor peptide. In some embodiments, the polynucleotide comprises a genomic sequence of a naturally-existing microbial organism. In some embodiments, the polynucleotide comprises a mutated genomic sequence of a naturally-existing microbial organism. In some embodiments, the polynucleotide comprises a plurality polynucleotides. In some embodiments, the plurality of polynucleotides each comprises a genomic sequence of a naturally existing microbial organism and/or a mutated genomic sequence of a naturally existing microbial organism. In some embodiments, the at least two of the plurality of polynucleotides comprise genomic sequences or mutated genomic sequences of different naturally existing microbial organisms. In some embodiments, the polynucleotide comprises a sequence selected from the odd numbers of SEQ ID Nos: 1-2630, or a homologous sequence having at least 30% identity of the odd numbers of SEQ ID Nos: 1-2630.

[0042] In some embodiments, the at least one component capable of producing the one or more lasso peptidase comprises the one or more lasso peptidase. In some embodiments, the one or more lasso peptidase is synthesized outside the CFB system. In some embodiments, the one or more lasso peptidase is isolated from a naturally-occurring microorganism. In some embodiments, the lasso peptidase is isolated as a cell extract of the naturally occurring microorganism.

[0043] In some embodiments, the at least one component capable of producing the one or more lasso peptidase comprises a polynucleotide encoding for the one or more lasso peptidase.

[0044] In some embodiments, the polynucleotide encoding for the lasso peptidase comprises a genomic sequence of a naturally-existing microbial organism. In some embodiments, the polynucleotide encoding for the one or more lasso peptidase comprises a plurality of polynucleotide encoding for the one or more lasso peptidase. In some embodiments, the plurality of polynucleotides each comprises a genomic sequence of a naturally existing microbial organism. In some embodiments, the at least two of the plurality of polynucleotides encoding the one or more lasso peptidase comprise genomic sequences of different naturally existing microbial organisms.

[0045] In some embodiments, the at least one component capable of producing the one or more lasso cyclase comprises the one or more lasso cyclase. In some embodiments, the one or more lasso cyclase is synthesized outside the CFB system. In some embodiments, the one or more lasso cyclase is isolated from a naturally-occurring microorganism. In some embodiments, the at least two of the one or more lasso cyclases are isolated from different naturally-occurring microorganisms. In some embodiments, the lasso peptidase is isolated as a cell extract of the naturally occurring microorganism.

[0046] In some embodiments, the at least one component capable of producing the one or more lasso cyclase comprises a polynucleotide encoding for the one or more lasso cyclase. In some embodiments, the at least one component capable of producing the one or more lasso cyclase comprises a plurality of polynucleotides encoding for the one or more lasso cyclase. In some embodiments, the polynucleotide encoding for the lasso cyclase comprises a genomic sequence of a naturally-existing microbial organism. In some embodiments, the at least two of the plurality of polynucleotides encoding the one or more lasso cyclase comprise genomic sequences of different naturally existing microbial organisms.

[0047] In some embodiments, the one or more lasso precursor peptide each comprises an amino acid sequence selected from the even number of SEQ ID Nos: 1-2630 or a sequence having at least 30% identity to the even number of SEQ ID Nos: 1-2630. In some embodiments, the one or more lasso peptidase each comprises an amino acid sequence selected from peptide Nos: 1316-2336 or a natural sequence having at least 30% identity to peptide Nos: 1316-2336. In some embodiments, the one or more lasso peptidase each comprises an amino acid sequence selected from peptide Nos: 2337-3761 or a natural sequence having at least 30% identity of peptide Nos: 2337-3761. In some embodiments, wherein the natural sequence is identified using a genomic mining tool described herein. In some embodiments, the CFB system further comprises at least one component capable of producing one or more RIPP recognition element (RRE).

[0048] In some embodiments, the one or more RRE each comprises an amino acid sequence selected from peptide Nos: 3762-4593, or a natural sequence having at least 30% identity of peptide Nos: 3762-4593. In some embodiments, the at least one component capable of producing the one or more RRE comprises the one more RRE. In some embodiments, the RRE comprises at least one component capable of producing the one or more RRE comprises a polynucleotide encoding for the one or more RRE. In some embodiments, the polynucleotide encoding for the one or more RRE comprises a plurality of polynucleotides encoding for the one or more RRE. In some embodiments, the polynucleotide encoding for the one or more RRE comprises a genomic sequence or a naturally existing microorganism. In some embodiments, at least two of the plurality of polynucleotides encoding the one or more RREs comprise genomic sequences of different naturally existing microbial organisms.

[0049] In some embodiments, the CFB system comprises a minimal set of lasso biosynthesis components. In some embodiments, the CFB system is capable of producing a combination of (i) lasso precursor peptide or a lasso core peptide, (ii) lasso cyclase, and (iii) lasso peptidase as listed in Table 1. In some embodiments, the CFB system is capable of producing a lasso peptide library. In some embodiments, the CFB system comprises a cell extract. In some embodiments, the CFB system comprises a supplemented cell extract. In some embodiments, the CFB system comprises a CFB reaction mixture. In some embodiments, the CFB system is capable of producing at least one lasso peptide or lasso peptide analog when incubated under a suitable condition. In some embodiments, the suitable condition is a substantially anaerobic condition. In some embodiments, the CFB comprises a cell extract, and the suitable condition comprises the natural growth condition of the cell where the cell extract is derived.

[0050] In some embodiments, the CFB system is in the form of a kit. In some embodiments, the one or more components of the CFB systems are separated into a plurality of parts forming the kit. In some embodiments, the plurality of parts forming the kit, when separated from one another, are substantially free of chemical or biochemical activity.

### 4. BRIEF DESCRIPTION OF THE FIGURES

[0051] The details of one or more embodiments of the invention are set forth in the accompanying drawings and the description below. Other features, objects, and benefits of the invention will be apparent from the description and drawings, and from the claims. All publications, patents and patent applications cited herein are hereby expressly incorporated by reference for all purposes.

[0052] The embodiments of the description described herein are not intended to be exhaustive or to limit the disclosure to the precise forms disclosed in the following drawings or detailed description. Rather, the embodiments are chosen and described so that others skilled in the art can appreciate and understand the principles and practices of the description.

[0053] FIG. 1A is a schematic illustration of the conversion of a lasso precursor peptide into a lasso peptide 1 with the lasso (lariat) topology.

[0054] FIG. 1B is a schematic illustration of the conversion of a lasso precursor peptide into a lasso peptide, where the leader peptidase (enzyme B) cleaves the leader sequence and conformationally positions the linear core peptide for closure, and the lasso cyclase (enzyme C) activates Glu or Asp at position 7, 8, or 9 of the core peptide and catalyzes cyclization with the N-terminus.

[0055] FIG. 2 shows a generalized 26-mer linear core peptide corresponding to a lasso peptide.

[0056] FIG. 3 is a schematic illustration of the process of discovering lasso peptide encoding genes by genomic mining, and cell-free biosynthesis of lasso peptide.

[0057] FIG. 4 is a schematic illustration of cell-flee biosynthesis of lasso peptides using in vitro transcription/translation, and construction of a lasso peptide library for screening of activities.

[0058] FIG. 5 illustrates a comparison between cell-based and cell-flee biosynthesis of lasso peptides.

[0059] FIG. 6 shows the results for detecting MccJ25 by LC/MS analysis.

[0060] FIG. 7 shows the results for detecting ukn22 by LC/MS analysis.

[0061] FIG. 8 shows the results for detecting capistruin, ukn22 and burhizin in individual vessels by MALDI-TOF analysis

[0062] FIG. 9 shows the results for detecting capistruin, ukn22 and burhizin in a single vessel by MALDI-TOF analysis

[0063] FIG. 10 shows the results for detecting ukn22 and five ukn22 variants, ukn22 W1Y, ukn22 W1F, ukn22 W1H, ukn22 W1L and ukn22 W1A, in individual vessels by MALDI-TOF analysis

[0064] FIG. 11 shows the results for detecting ukn22 and five ukn22 variants, ukn22 W1Y, ukn22 W1F, ukn22 W1H, ukn22 W1L and ukn22 W1A, in a single vessel by MALDI-TOF analysis.

[0065] FIG. 12 shows the results for detecting cellulonodin in a single vessel by MALDI-TOF analysis.

### 5. DETAILED DESCRIPTION

[0066] The novel features of this invention are set forth specifically in the appended claims. A better understanding of the features and benefits of the present invention will be obtained by reference to the following detailed description that sets forth illustrative embodiments, in which the principles of the invention are utilized. To facilitate a full understanding of the disclosure set forth herein, a number of terms are defined below.

### 5.1 General Techniques

[0067] Techniques and procedures described or referenced herein include those that are generally well understood and/or commonly employed using conventional methodology by those skilled in the art, such as, for example, the widely utilized methodologies described in Sambrook et al., Molecular Cloning: A Laboratory Manual (4th ed. 2012); Current Protocols in Molecular Biology (Ausubel et al. eds., 2003); Therapeutic Monoclonal Antibodies: From Bench to Clinic (An ed. 2009); Monoclonal Antibodies: Methods and Protocols (Albitar ed. 2010); and Antibody Engineering Vols 1 and 2 (Kontermann and Dübel eds., 2nd ed. 2010). Molecular Biology of the Cell (6th Ed., 2014). Organic Chemistry, (Thomas Sorrell, 1999). March's Advanced Organic Chemistry (6^{th} ed. 2007). Lasso Peptides, (Li, Y.; Zirah, S.; Rebuffet, S., Springer; New York, 2015).

### 5.2 Terminology

[0068] Unless described otherwise, all technical and scientific terms used herein have the same meaning as is commonly understood by one of ordinary skill in the art. For purposes of interpreting this specification, the following description of terms will apply and whenever appropriate, terms used in the singular will also include the plural and vice versa. All patents, applications, published applications, and other publications are incorporated by reference in their entirety. In the event that any description of terms set forth conflicts with any document incorporated herein by reference, the description of term set forth below shall control.

[0069] As used herein, the singular terms “a,” “an,” and “the” include the plural reference unless the context clearly indicates otherwise.

[0070] Unless otherwise indicated, the terms “oligonucleotides” and “nucleic acids” are used interchangeably and are written left to right in 5′ to 3′ orientation; amino acid sequences are written left to right in amino to carboxy orientation, respectively. Therefore, in general, the codon at the 5′-terminus of an oligonucleotide will correspond to the N-terminal amino acid residue that is incorporated into a translated protein or peptide product. Similarly, in general, the codon at the 3′-terminus of an oligonucleotide will correspond to the C-terminal amino acid residue that is incorporated into a translated protein or peptide product. It is to be understood that this invention is not limited to the particular methodology, protocols, and reagents described, as these may vary, depending upon the context they are used by those of skill in the art.

[0071] As used herein, the term “naturally occurring” or “natural” or “native” when used in connection with naturally occurring biological materials such as nucleic acid molecules, oligonucleotides, amino acids, polypeptides, peptides, metabolites, small molecule natural products, host cells, and the like, refers to materials that are found in or isolated directly from Nature and are not changed or manipulated by humans. The term “natural” or “naturally occurring” refers to organisms, cells, genes, biosynthetic gene clusters, enzymes, proteins, oligonucleotides, and the like that are found in Nature and are unchanged relative to these components found in Nature. The term “wild-type” refers to organisms, cells, genes, biosynthetic gene clusters, enzymes, proteins, oligonucleotides, and the like that are found in Nature and are unchanged relative to these components found in Nature (in the wild).

[0072] As defined herein, the term “natural product” refers to any product, a small molecule, organic compound, or peptide produced by living organisms, e.g., prokaryotes or eukaryotes, found in Nature, and which are produced through natural biosynthetic processes. As defined herein, “natural products” are produced through an organism's secondary metabolism or through biosynthetic pathways that are not essential for survival and not directly involved in cell growth and proliferation.

[0073] As used herein, the term “non-naturally occurring” or “non-natural” or “unnatural” or “non-native” refer to a material, substance, molecule, cell, enzyme, protein or peptide that is not known to exist or is not found in Nature or that has been structurally modified and/or synthesized by humans. The term “non-natural” or “unnatural” or “non-naturally occurring” when used in reference to a microbial organism or microorganism or cell extract or gene or biosynthetic gene cluster of the invention is intended to mean that the microbial organism or derived cell extract or gene or biosynthetic gene cluster has at least one genetic alteration not normally found in a naturally occurring strain or a naturally occurring gene or biosynthetic gene cluster of the referenced species, including wild-type strains of the referenced species. Genetic alterations include, for example, introduction of expressible oligonucleotides or nucleic acids encoding polypeptides, other nucleic acid additions, nucleic acid deletions and/or other functional disruption of the microbial organism's genetic material. Such modifications include, for example, nucleotide changes, additions, or deletions in the genomic coding regions and functional fragments thereof, used for heterologous, homologous or both heterologous and homologous expression of polypeptides. Additional modifications include, for example, nucleotide changes, additions, or deletions in the genomic non-coding and/or regulatory regions in which the modifications alter expression of a gene or operon. Exemplary polypeptides include enzymes, proteins, or peptides within a lasso peptide biosynthetic pathway.

[0074] The terms “cell-free biosynthesis” and “CFB” are used interchangeably herein and refer to an in vitro (outside the cell) biosynthetic process that employs a “cell-flee biosynthesis reaction mixture”, including all the genes, enzymes, proteins, pathways, and other biosynthetic machinery necessary to carry out the biosynthesis of products, including RNA, proteins, enzymes, co-factors, natural products, small molecules, organic molecules, lasso peptides and the like, without the agency of a living cellular system.

[0075] The terms “cell-free biosynthesis system” and “CFB system” are used interchangeably and refer to the experimental design, set-up, apparatus, equipment, and materials, including a cell-flee biosynthesis reaction mixture and cell extracts, as defined below, that carries out a cell-free biosynthesis reaction and produce a desired product, such as a lasso peptide or lasso peptide analog.

[0076] The terms “cell-free biosynthesis reaction mixture” and “CFB reaction mixture” are used interchangeably and refer to the composition, in part or in its entirety, that enables a cell-flee biosynthesis reaction to occur and produce the biosynthetic proteins, enzymes, and peptides, as well as other products of interest, including but not limited to lasso precursor peptides, lasso core peptides, lasso peptides, or lasso peptide analogs. As defined herein, a “CFB reaction mixture” comprises one or more cell extracts or cell-free reaction media or supplemented cell extracts that support and facilitate a biosynthetic process in the absence of cells, wherein the CFB reaction mixture supports and facilitates the formation of a lasso peptide or lasso peptide analog through the activity of a lasso cyclase, and optionally the activity of a lasso peptidase, and optionally activities of polynucleotides that are converted into a lasso cyclase, a lasso peptidase, a lasso precursor peptide, a lasso core peptide, a lasso peptide, and/or a lasso peptide analog. A CFB reaction mixture may also comprise the oligonucleotides, genes, biosynthetic gene clusters, enzymes, proteins, and final peptide products, including lasso precursor peptides, lasso core peptides, lasso peptides, and/or lasso peptide analogs that result from performing a CFB reaction.

[0077] The terms “cell extract” and “cell-free extract” are used interchangeably and refer to the material and composition obtained by: (i) growing cells, (ii) breaking open or lysing the cells by mechanical, biological or chemical means, (iii) removing cell debris and insoluble materials e.g., by filtration or centrifugation, and (iv) optionally treating to remove residual RNA and DNA, but retaining the active enzymes and biosynthetic machinery for transcription and translation, and optionally the metabolic pathways for co-factor recycle, including but not limited to co-factors such as THF, S-adenosylmethionine, ATP, NADH, NAD and NADP and NADPH. In some embodiments, to produce a CFB reaction mixture, a cell extract or cell extracts may be supplemented to create a “supplemented cell extract” as described below.

[0078] As used herein, the term “supplemented cell extract” refers to a cell extract, used as part of a CFB reaction mixture, which is supplemented with all twenty proteinogenic naturally occurring amino acids and corresponding transfer ribonucleic acids (tRNAs), and optionally, may be supplemented with additional components, including but not limited to: (1) glucose, xylose, fructose, sucrose, maltose, or starch, (2) adenosine triphosphate (ATP), and/or adenosine diphosphate (ADP), purine and guanidine nucleotides, adenosine triphosphate, guanosine triphosphate, cytosine triphosphate, and/or uridine triphosphate, or combinations thereof, (3) cyclic-adenosine monophosphate (cAMP) and/or 3-phosphoglyceric acid (3-PGA), (4) nicotimamide adenine dinucleotides NADH and/or NAD, or nicotimamide adenine dinucleotide phosphates, NADPH, and/or NADP, or combinations thereof, (5) amino acid salts such as magnesium glutamate and/or potassium glutamate, (6) buffering agents such as HEPES, TRIS, spermidine, or phosphate salts, (7) inorganic salts, including but not limited to, potassium phosphate, sodium chloride, magnesium phosphate, and magnesium sulfate, (8) cofactors such as folinic acid and co-enzyme A (CoA), L(−)-5-formyl-5,6,7,8-tetrahydrofolic acid (THF), and/or biotin, (8) RNA polymerase, (9) 1,4-dithiothreitol (DTT), (10) magnesium acetate, and/or ammonium acetate, and/or (11) crowding agents such as PEG 8000, Ficoll 70, or Ficoll 400, or combinations thereof.

[0079] The terms “in vitro transcription and translation” and “TX-TL” are used interchangeably and refer to a cell-free biosynthesis process whereby biosynthetic genes, enzymes, and precursors are added to a cell-free biosynthesis system that possesses the machinery to carry out DNA transcription of genes or oligonucleotides leading to messenger ribonucleic acids (mRNA), and mRNA translation leading to proteins and peptides, including proteins that serve as enzymes to convert a lasso precursor peptide or lasso core peptide into a lasso peptide or lasso peptide analog. As used herein, the term “in vitro TX-TL machinery” refers to the components of a cell-free biosynthesis system that carry out DNA transcription of genes or oligonucleotides leading to messenger ribonucleic acids (mRNA), and mRNA translation leading to proteins and peptides.

[0080] The term “minimal set of lasso peptide biosynthesis components” as used herein refers to the minimum combination of components that is able to biosynthesize a lasso peptide without the help of any additional substance or functionality. The make-up of the minimal set of lasso peptide biosynthesis components may vary depending on the content and functionality of the components. Furthermore, the components forming the minimal set may present in varied forms, such as peptides, proteins, and nucleic acids.

[0081] The terms “analog” and “derivative” are used interchangeably to refer to a molecule such as a lasso peptide, that have been modified in some fashion, through chemical or biological means, to produce a new molecule that is similar but not identical to the original molecule.

[0082] The term “lasso peptide” as used herein refers to a naturally-existing peptide or polypeptide having the general structure 1 as shown in FIG. 1A. In some embodiments, a lasso peptide is a peptide or polypeptide of at least eleven and up to about fifty amino acids sequence, which comprises an N-terminal core peptide, a middle loop region, and a C-terminal tail. The N-terminal core peptide forms a ring by cyclizing through the formation of an isopeptide bond between the N-terminal amino group of the core peptide and the side chain carboxyl groups of glutamate or aspartate residues located at positions 7, 8, or 9 of the core peptide, wherein the resulting macrolactam ring is formed around the C-terminal linear tail, which is threaded through the ring leading to the lasso (also referred to as lariat) topology held in place through sterically bulky side chains above and below the plane of the ring. In some embodiments, a lasso peptide contains one or more disulfide bond(s) formed between the tail and the ring. In some embodiments, a lasso peptide contains one or more disulfide bond(s) formed within the amino acid sequence of the tail.

[0083] The terms “lasso peptide analog” or “lasso peptide variant” are used herein interchangeably and refer to a derivative of a lasso peptide that has been modified or changed relative to its original structure or atomic composition. In various embodiments, the lasso peptide analog can (i) have at least one amino acid substitution(s), insertion(s) or deletion(s) as compared to the sequence of a lasso peptide; (ii) have at least one different modification(s) to the amino acids as compared to a lasso peptide, such modifications include but are not limited to acylation, biotinylation, O-methylation, N-methylation, amidation, glycosylation, esterification, halogenation, amination, hydroxylation, dehydrogenation, prenylation, lipidoylation, heterocyclization, phosphorylation; (iii) have at least one unnatural amino acid(s) as compared to the sequence of a lasso peptide; (iv) have at least one different isotope(s) as compared to the lasso peptide molecule; or any combination of (i) to (iv). As used herein, the term of “lasso peptide analog” also includes a conjugate or fusion made of a lasso peptide or a lasso peptide analog and one or more additional molecule(s). In some embodiments, the additional molecule can be another peptide or protein, including but not limited a lasso peptide and a cell surface receptor or an antibody or an antibody fragment. In some embodiments, the additional molecule can be a non-peptidic molecule, such as a drug molecule. In some embodiments, the lasso peptide analogs retain the same general lasso topology as shown in FIG. 1A. In some embodiments, production of a lasso peptide analog may occur by introducing a modification into the gene of a lasso precursor or core peptide, followed by transcription and translation and cyclization using CFB methods, as described herein, leading to a lasso peptide containing that modification. In an alternative embodiment, production of a lasso peptide analog may occur by introducing a modification into a lasso precursor or core peptide, followed by cyclization of each using CFB methods, as described herein, leading to a lasso peptide containing that modification. In another embodiment, production of a lasso peptide analog may occur by introducing a modification into a pre-formed lasso peptide, leading to a lasso peptide containing that modification.

[0084] The term “lasso peptide library” as used herein refers to a collection of at least two lasso peptides or lasso peptide analogs, or combinations thereof, which may be pooled together as a mixture or kept separated from one another. In some embodiments, the lasso peptide library is kept in vitro, such as in tubes or wells. In some embodiments, the lasso peptide library may be created by biosynthesis of at least two lasso peptides or lasso peptide variants using a CFB system. In some embodiments, the lasso peptides or lasso peptide variants of the library may be mixed with one or more component of the CFB system. In other embodiments, the lasso peptides or lasso peptide variants may be purified from the CFB system. In some embodiments, the lasso peptides or lasso peptide variants may be partially purified. In some embodiments, the lasso peptides or lasso peptide variants may be substantially purified. In some embodiments, the lasso peptides may be isolated. In some embodiments, the lasso peptide library may be created by isolating at least two lasso peptides from their natural environment. In some embodiments, the lasso peptides may be partially isolated. In some embodiments, the lasso peptides may be substantially isolated.

[0085] The term “isotopic variant” of a lasso peptide refers to a lasso peptide analog that contains an unnatural proportion of an isotope at one or more of the atoms that constitute such a peptide. In certain embodiments, an “isotopic variant” of a lasso peptide analog contains unnatural proportions of one or more isotopes, including, but not limited to, hydrogen (¹H), deuterium (²H), tritium (³H), carbon-11 (¹¹C), carbon-12 (¹²C) carbon-13 (¹³C), carbon-14 (¹⁴C), nitrogen-13 (¹³N), nitrogen-14 (¹⁴N), nitrogen-15 (¹⁵N), oxygen-14 (¹⁴O), oxygen-15 (¹⁵O), oxygen-16 (¹⁶O), oxygen-17 (¹⁷O), oxygen-18 (¹⁸O) fluorine-17 (¹⁷F), fluorine-18 (¹⁸F), phosphorus-31 (³¹P), phosphorus-32 (³²P), phosphorus-33 (³³P), sulfur-32 (³²S), sulfur-33 (³³S), sulfur-34 (³⁴S), sulfur-35 (³⁵S), sulfur-36 (³⁶S), chlorine-35 (³⁵Cl), chlorine-36 (³⁶Cl), chlorine-37 (³⁷Cl), bromine-79 (⁷⁹Br), bromine-81 (⁸¹Br), iodine-123 (¹²³I) iodine-125 (¹²⁵I) iodine-127 (¹²⁷I) iodine-129 (¹²⁹I) and iodine-131 (¹³¹I). In certain embodiments, an “isotopic variant” of a lasso peptide is in a stable form, that is, non-radioactive. In certain embodiments, an “isotopic variant” of a lasso peptide contains unnatural proportions of one or more isotopes, including, but not limited to, hydrogen (¹H), deuterium (²H), carbon-12 (¹²C), carbon-13 (¹³C), nitrogen-14 (¹⁴N), nitrogen-15 (¹⁵N), oxygen-16 (¹⁶O) oxygen-17 (¹⁷O), oxygen-18 (¹⁸O) fluorine-17 (¹⁷F), phosphorus-31 (³¹P), sulfur-32 (³²S), sulfur-33 (³³S), sulfur-34 (³⁴S), sulfur-36 (³⁶S), chlorine-35 (³⁵Cl), chlorine-37 (³⁷Cl), bromine-79 (⁷⁹Br), bromine-81 (⁸¹Br), and iodine-127 (¹²⁷I). In certain embodiments, an “isotopic variant” of a lasso peptide is in an unstable form, that is, radioactive. In certain embodiments, an “isotopic variant” of a compound contains unnatural proportions of one or more isotopes, including, but not limited to, tritium (³H), carbon-11 (¹¹C), carbon-14 (¹⁴C), nitrogen-13 (¹³N), oxygen-14 (¹⁴O), oxygen-15 (¹⁵O), fluorine-18 (¹⁸F), phosphorus-32 (³²P), phosphorus-33 (³³P), sulfur-35 (³⁵S), chlorine-36 (³⁶Cl), iodine-123 (¹²³I) iodine-125 (¹²⁵I) iodine-129 (¹²⁹I) and iodine-131 (¹³¹I). It will be understood that, in a lasso peptide or lasso peptide analog as provided herein, any hydrogen can be ²H, as example, or any carbon can be ¹³C, as example, or any nitrogen can be ¹⁵N, as example, and any oxygen can be ¹⁸O, as example, where feasible according to the judgment of one of skill in the art. In certain embodiments, an “isotopic variant” of a lasso peptide contains an unnatural proportion of deuterium. Unless otherwise stated, structures of compounds (including peptides) depicted herein are also meant to include compounds that differ only in the presence of one or more isotopically enriched atoms. For example, compounds having the present structures including the replacement of hydrogen by deuterium or tritium, or the replacement of a carbon by a ¹³C- or ¹⁴C-enriched carbon are within the scope of this invention. Such compounds are useful, for example, as analytical tools, as probes in biological assays, or as therapeutic agents in accordance with the present invention.

[0086] A “metabolic modification” refers to a biochemical reaction or biosynthetic pathway that is altered from its naturally-occurring state. Therefore, non-naturally occurring microorganisms can have genetic modifications to nucleic acids encoding metabolic polypeptides, or functional fragments thereof, which do not occur in the wild-type or natural organism.

[0087] As used herein, the term “isolated” when used in reference to a microbial organism or a biosynthetic gene, or a biosynthetic gene cluster, or a protein, or an enzyme, or a peptide, is intended to mean an organism, gene or biosynthetic gene cluster, protein, enzyme, or peptide that is substantially free of at least one component relative to the referenced microbial organism, gene, biosynthetic gene cluster, protein, enzyme, or peptide is found in nature or in its natural habitat. The term includes a microbial organism, gene, biosynthetic gene cluster, protein, enzyme, or peptide that is removed from some or all components as it is found in its natural environment. Therefore, an isolated microbial organism, gene, biosynthetic gene cluster, protein, enzyme, or peptide is partly or completely separated from other substances as it is found in nature or as it is grown, stored or subsisted in non-naturally occurring environments (e.g., laboratories). Specific examples of isolated microbial organisms, genes, biosynthetic gene clusters, proteins, enzymes, or peptides include partially pure microbes, genes, biosynthetic gene clusters, proteins, enzymes, or peptides, substantially pure microbes, genes biosynthetic gene clusters, proteins, enzymes, or peptides, and microbes cultured in a medium that is non-naturally occurring, or genes or biosynthetic gene clusters cloned in non-naturally occurring plasmids, or proteins, enzymes, or peptides purified from other components and substances present their natural environment, including other proteins, enzymes, or peptides.

[0088] As used herein, the terms “microbial,” “microbial organism” or “microorganism” are intended to mean any organism that exists as a microscopic cell that is included within the domains of archaea, bacteria or eukarya. Therefore, the term is intended to encompass prokaryotic or eukaryotic cells or organisms having a microscopic size and includes bacteria, archaea and eubacteria of all species as well as eukaryotic microorganisms such as yeast and fungi. The term also includes cell cultures of any species that can be cultured for the production of a biochemical.

[0089] As used herein, the term “CoA” or “coenzyme A” is intended to mean an organic cofactor or prosthetic group (nonprotein portion of an enzyme) whose presence facilitates the activity of many enzymes (the apoenzyme) to form an active enzyme system. Coenzyme A functions in certain condensing enzymes, acts in acetyl or other acyl group transfer and in fatty acid synthesis and oxidation, pyruvate oxidation and in other acetylation.

[0090] As used herein, the term “substantially anaerobic” when used in reference to a culture or growth condition is intended to mean that the amount of oxygen is less than about 10% of saturation for dissolved oxygen in liquid media. The term also is intended to include sealed chambers of liquid or solid medium maintained with an atmosphere of less than about 1% oxygen.

[0091] The term “exogenous” as it is used herein is intended to mean that the referenced molecule or the referenced activity is introduced into the host microbial organism. The molecule can be introduced, for example, by introduction of an encoding nucleic acid into the host genetic material such as by integration into a host chromosome or as non-chromosomal genetic material such as a plasmid. Therefore, the term as it is used in reference to expression of an encoding nucleic acid refers to introduction of the encoding nucleic acid in an expressible form into a microbial organism or into a cell extract for cell-free expression. When used in reference to a biosynthetic activity, the term refers to an activity that is introduced into the host reference organism or into a cell extract for cell-free activity. The source can be, for example, a homologous or heterologous encoding nucleic acid that expresses the referenced activity following introduction into the host microbial organism or into a cell extract for cell-free expression of activity. Therefore, the term “endogenous” refers to a referenced molecule or activity that is present in a microbial host. Similarly, the term when used in reference to expression of an encoding nucleic acid refers to expression of an encoding nucleic acid contained within the microbial organism or into a cell extract. The term “heterologous” refers to a molecule or activity derived from a source other than the referenced species whereas “homologous” refers to a molecule or activity derived from the host microbial organism or organism used to produce a cell-flee extract. Accordingly, exogenous expression of an encoding nucleic acid of the invention can utilize either or both a heterologous or homologous encoding nucleic acid.

[0092] The term “stable,” as used herein, refers to compounds that are not substantially altered when subjected to conditions to allow for their production, detection, and, in certain embodiments, their recovery, purification, and use for one or more of the purposes disclosed herein.

[0093] The term “semi-synthesis” refers to modifying a natural material synthetically to create a new variant, derivative, or analog of the original natural material. For example, semisynthesis of a lasso peptide analog could involve chemical or enzymatic addition of biotin to an amino or sulfhydryl group on an amino acid side chain of a lasso peptide. The terms “derivative” or “analog” refer to a structural variant of compound that derives from a natural or non-natural material.

[0094] The terms “optically active” and “enantiomerically active” refer to a collection of molecules, which has an enantiomeric excess of no less than about 50%, no less than about 70%, no less than about 80%, no less than about 90%, no less than about 91%, no less than about 92%, no less than about 93%, no less than about 94%, no less than about 95%, no less than about 96%, no less than about 97%, no less than about 98%, no less than about 99%, no less than about 99.5%, or no less than about 99.8%. In certain embodiments, the compound comprises about 95% or more of one enantiomer and about 5% or less of the other enantiomer based on the total weight of the racemate in question. In describing an optically active compound, the prefixes R and S are used to denote the absolute configuration of the molecule about its chiral center(s). The symbols (+) and (−) are used to denote the optical rotation of the compound, that is, the direction in which a plane of polarized light is rotated by the optically active compound. The (−) prefix indicates that the compound is levorotatory, that is, the compound rotates the plane of polarized light to the left or counterclockwise. The (+) prefix indicates that the compound is dextrorotatory, that is, the compound rotates the plane of polarized light to the right or clockwise. However, the sign of optical rotation, (+) and (−), is not related to the absolute configuration of the molecule, R and S.

[0095] The term “about” or “approximately” means an acceptable error for a particular value as determined by one of ordinary skill in the art, which depends in part on how the value is measured or determined. In certain embodiments, the term “about” or “approximately” means within 1, 2, 3, or 4 standard deviations. In certain embodiments, the term “about” or “approximately” means within 50%, 20%, 15%, 10%, 9%, 8%, 7%, 6%, 5%, 4%, 3%, 2%, 1%, 0.5%, or 0.05% of a given value or range.

[0096] The terms “drug” and “therapeutic agent” refer to a compound, or a pharmaceutical composition thereof, which is administered to a subject for treating, preventing, or ameliorating one or more symptoms of a disorder, disease, or condition.

[0097] The term “subject” refers to an animal, including, but not limited to, a primate (e.g., human), cow, pig, sheep, goat, horse, dog, cat, rabbit, rat, or mouse. The terms “subject” and “patient” are used interchangeably herein in reference, for example, to a mammalian subject, such as a human subject, in one embodiment, a human.

[0098] The terms “treat,” “treating,” and “treatment” are meant to include alleviating or abrogating a disorder, disease, or condition, or one or more of the symptoms associated with the disorder, disease, or condition; or alleviating or eradicating the cause(s) of the disorder, disease, or condition itself.

[0099] The terms “prevent,” “preventing,” and “prevention” are meant to include a method of delaying and/or precluding the onset of a disorder, disease, or condition, and/or its attendant symptoms; barring a subject from acquiring a disorder, disease, or condition; or reducing a subject's risk of acquiring a disorder, disease, or condition.

[0100] The term “therapeutically effective amount” are meant to include the amount of a therapeutic agent that, when administered, is sufficient to prevent development of, or alleviate to some extent, one or more of the symptoms of the disorder, disease, or condition being treated. The term “therapeutically effective amount” also refers to the amount of a compound that is sufficient to elicit the biological or medical response of a biological molecule (e.g., a protein, enzyme, RNA, or DNA), cell, tissue, system, animal, or human, which is being sought by a researcher, veterinarian, medical doctor, or clinician.

[0101] The term “IC₅₀” refers an amount, concentration, or dosage of a compound that results in 50% inhibition of a maximal response in an assay that measures such response. The term “EC₅₀” refers an amount, concentration, or dosage of a compound that results in for 50% of a maximal response in an assay that measures such response. The term “CC₅₀” refers an amount, concentration, or dosage of a compound that results in 50% reduction of the viability of a host. In certain embodiments, the CC₅₀ of a compound is the amount, concentration, or dosage of the compound that that reduces the viability of cells treated with the compound by 50%, in comparison with cells untreated with the compound. The term “K_{d}” refers to the equilibrium dissociation constant for a ligand and a protein, which is measured to assess the binding strength that a small molecule ligand (such as a small molecule drug) has for a protein or receptor, such as a cell surface receptor. The dissociation constant, K_{d}, is commonly used to describe the affinity between a ligand and a protein or receptor; i.e., how tightly a ligand binds to a particular protein or receptor, and is the inverse of the association constant. Ligand-protein affinities are influenced by non-covalent intermolecular interactions between the two molecules such as hydrogen bonding, electrostatic interactions, hydrophobic and van der Waals forces. The analogous term “Kᵢ” is the inhibitor constant or inhibition constant, which is the equilibrium dissociation constant for an enzyme inhibitor, and provides an indication of the potency of an inhibitor.

[0102] As used herein, the phrase “biologically active” refers to a characteristic of any substance that has activity in a biological system and/or organism. For instance, a substance that, when administered to an organism, has a biological effect on that organism is considered to be biologically active. In particular embodiments, where a peptide or polypeptide is biologically active, a portion of that peptide or polypeptide that shares at least one biological activity of the peptide or polypeptide is typically referred to as a “biologically active” portion.

[0103] The terms “polypeptide” and “protein” are used interchangeably herein to refer to a polymer of greater than about fifty (50) amino acid residues. That is, a description directed to a polypeptide applies equally to a description of a protein, and vice versa. The terms apply to naturally occurring amino acid polymers as well as amino acid polymers in which one or more amino acid residues is a non-naturally occurring amino acid, e.g., an amino acid analog. As used herein, the terms encompass amino acid chains of any length, including full length proteins (i.e., antigens), wherein the amino acid residues are linked by covalent peptide bonds.

[0104] The term “peptide” as used herein refers to a polymer chain containing between two and fifty (2-50) amino acid residues. The terms apply to naturally occurring amino acid polymers as well as amino acid polymers in which one or more amino acid residues is a non-naturally occurring amino acid, e.g., an amino acid analog or non-natural amino acid.

[0105] The term “amino acid” refers to naturally occurring and non-naturally occurring alpha-amino acids, as well as alpha-amino acid analogs and amino acid mimetics that function in a manner similar to the naturally occurring alpha-amino acids. Naturally encoded amino acids are the 22 common amino acids (alanine, arginine, asparagine, aspartic acid, cysteine, glutamine, glutamic acid, glycine, histidine, isoleucine, leucine, lysine, methionine, phenylalanine, proline, serine, threonine, tryptophan, tyrosine, valine, pyrrolysine and selenocysteine). Amino acid analogs or derivatives refers to compounds that have the same basic chemical structure as a naturally occurring amino acid, i.e., a carbon that is bound to a hydrogen, a carboxyl group, an amino group, and a side chain R group, such as, homoserine, norleucine, methionine sulfoxide, methionine methyl sulfonium. Such analogs have modified R groups (such as, norleucine) or modified peptide backbones, but retain the same basic chemical structure as a naturally occurring amino acid. Amino acids may be referred to herein by either their commonly known three letter symbols or by the one-letter symbols recommended by the IUPAC-IUB Biochemical Nomenclature Commission. Nucleotides, likewise, may be referred to by their commonly accepted single-letter codes.

[0106] The terms “non-natural amino acid” or “non-proteinogenic amino acid” or “unnatural amino acid” refer to alpha-amino acids that contain different side chains (different R groups) relative to those that appear in the twenty-two common or naturally occurring amino acids listed above. In addition, these terms also can refer to amino acids that are described as having D-stereochemistry, rather than L-stereochemistry of natural amino acids, despite the fact that some amino acids do occur in the D-stereochemical form in Nature (e.g., D-alanine and D-serine).

[0107] The terms “oligonucleotide” and “nucleic acid” refer to oligomers of deoxyribonucleotides (e.g., DNA) or ribonucleotides (e.g., RNA) and polymers thereof in either single- or double-stranded form. Unless specifically limited, the term encompasses nucleic acids containing known analogues of natural nucleotides which have similar binding properties as the reference nucleic acid and are metabolized in a manner similar to naturally occurring nucleotides. Unless specifically limited otherwise, the term also refers to oligonucleotide analogs including PNA (peptidonucleic acid), analogs of DNA used in antisense technology (phosphorothioates, phosphoroamidates, and the like). Unless otherwise indicated, a particular nucleic acid sequence also implicitly encompasses conservatively modified variants thereof (including but not limited to, degenerate codon substitutions) and complementary sequences as well as the sequence explicitly indicated. Specifically, degenerate codon substitutions may be achieved by generating sequences in which the third position of one or more selected (or all) codons is substituted with mixed-base and/or deoxyinosine residues (Batzer, M. A., et al., Nucleic Acid Res., 1991, 19, 5081-1585; Ohtsuka, E. et al., J. Biol. Chem., 1985, 260, 2605-2608; and Rossolini, G. M., et al., Mol. Cell. Probes, 1994, 8, 91-98).

[0108] The term “antibody” describes an immunoglobulin whether natural or partly or wholly synthetically produced. The term also covers any peptide or protein having a binding domain which is, or is homologous to, an antigen binding domain. CDR grafted antibodies are also contemplated by this term. The term antibody as used herein will also be understood to mean one or more fragments of an antibody that retain the ability to specifically bind to an antigen, (Holliger, P. et al., Nature Biotech., 2005, 23 (9), 1126-1129). Non-limiting examples of such antibodies include (i) a Fab fragment, a monovalent fragment consisting of the VL, VH, CL and CH1 domains; (ii) a F(ab′)2 fragment, a bivalent fragment comprising two Fab fragments linked by a disulfide bridge at the hinge region; (iii) a Fd fragment consisting of the VH and CH1 domains; (iv) a Fv fragment consisting of the VL and VH domains of a single arm of an antibody, (v) a dAb fragment (Ward, E. S., et al., Nature, 1989, 341, 544-546), which consists of a VH domain: and (vi) an isolated complementarity determining region (CDR). Furthermore, although the two domains of the Fv fragment, VL and VH, are coded for by separate genes, they are optionally joined, using recombinant methods, by a synthetic linker that enables them to be made as a single protein chain in which the VL and VH regions pair to form monovalent molecules (known as single chain Fv (scFv); see e.g., Bird, R E., et al., Science, 1988, 242, 423-426; Huston, J. S., et al., Proc. Natl. Acad. Sci. USA, 1988, 85, 5879-5883; and Osboum, J. K., et al., Nat. Biotechnol., 1998, 16, 778-781). Such single chain antibodies are also intended to be encompassed within the term antibody.

[0109] The term “assaying” is meant the creation of experimental conditions and the gathering of data regarding a particular result of the exposure to specific experimental conditions. For example, enzymes can be assayed based on their ability to act upon a detectable substrate. A lasso peptide can be assayed based on its ability to bind to a particular target molecule or molecules.

[0110] As used herein, the term “modulating” or “modulate” refers to an effect of altering a biological activity (i.e. increasing or decreasing the activity), especially a biological activity associated with a particular biomolecule such as a cell surface receptor. For example, an inhibitor of a particular biomolecule modulates the activity of that biomolecule, e.g., an enzyme, by decreasing the activity of the biomolecule, such as an enzyme. Such activity is typically indicated in terms of an inhibitory concentration (IC₅₀) of the compound for an inhibitor with respect to, for example, an enzyme.

[0111] As defined herein, the term “contacting” means that the compound(s) are combined and/or caused to be in sufficient proximity to particular other components, including, but not limited to, molecules, enzymes, peptides, oligonucleotides, complexes, cells, tissues, or other specified materials that potential binding interactions and/or chemical reaction between the compound and other components can occur.

[0112] It is understood that when more than one exogenous nucleic acid is included in a microbial organism or in a cell extract from a microbial organism that the more than one exogenous nucleic acids refer to the referenced encoding nucleic acid or biosynthetic activity, as discussed above. It is further understood, as disclosed herein, that such more than one exogenous nucleic acids can be introduced into the host microbial organism or into a cell extract, on separate nucleic acid molecules, on polycistronic nucleic acid molecules, or a combination thereof, and still be considered as more than one exogenous nucleic acid. For example, as disclosed herein, a microbial organism or a cell extract can be engineered to express two or more exogenous nucleic acids encoding a desired biosynthetic pathway enzyme, peptide, or protein. In the case where two exogenous nucleic acids encoding a desired activity are introduced into a host microbial organism or into a cell extract, it is understood that the two exogenous nucleic acids can be introduced as a single nucleic acid, for example, on a single plasmid or as linear strands of DNA, or on separate plasmids, or can be integrated into the host chromosome at a single site or multiple sites, and still be considered as two exogenous nucleic acids. Similarly, it is understood that more than two exogenous nucleic acids can be introduced into a host organism or into a cell extract in any desired combination, for example, on a single plasmid, or on separate plasmids, or as linear strands of DNA, or can be integrated into the host chromosome at a single site or multiple sites, and still be considered as two or more exogenous nucleic acids, for example three exogenous nucleic acids. Thus, the number of referenced exogenous nucleic acids or biosynthetic activities refers to the number of encoding nucleic acids or the number of biosynthetic activities, not the number of separate nucleic acids introduced into the host organism or into a cell extract.

[0113] Those skilled in the art will understand that the genetic alterations, including metabolic modifications exemplified herein, are described with reference to a suitable host organism or a cell extract from a suitable host organism, such as E. coli and their corresponding metabolic reactions or a suitable source organism for desired genetic material such as genes, oligonucleotides, proteins, enzymes, and peptides for any desired metabolic pathways. However, given the complete genome sequencing of a wide variety of organisms and the high level of skill in the area of genomics, those skilled in the art will readily be able to apply the teachings and guidance provided herein to essentially all other organisms. For example, alterations to E. coli metabolic pathways and cell extracts derived thereof, and exemplified herein, can readily be applied to other species by incorporating the same or analogous encoding nucleic acid from species other than the referenced species. Such genetic alterations include, for example, genetic alterations of species homologs, in general, and in particular, orthologs, paralogs or nonorthologous gene displacements.

[0114] An ortholog is a gene or genes that are related by vertical descent and are responsible for substantially the same or identical functions in different organisms. For example, mouse epoxide hydrolase and human epoxide hydrolase can be considered orthologs for the biological function of hydrolysis of epoxides. Genes are related by vertical descent when, for example, they share sequence similarity of sufficient amount to indicate they are homologous, or related by evolution from a common ancestor. Genes can also be considered orthologs if they share three-dimensional structure but not necessarily sequence similarity, of a sufficient amount to indicate that they have evolved from a common ancestor to the extent that the primary sequence similarity is not identifiable. Genes that are orthologous can encode proteins with sequence similarity of about 25% to 100% amino acid sequence identity. Genes encoding proteins sharing an amino acid similarity less than 25% can also be considered to have arisen by vertical descent if their three-dimensional structure also shows similarities. Members of the serine protease family of enzymes, including tissue plasminogen activator and elastase, are considered to have arisen by vertical descent from a common ancestor.

[0115] Orthologs include genes or their encoded gene products that through, for example, evolution, have diverged in structure or overall activity. For example, where one species encodes a gene product exhibiting two functions and where such functions have been separated into distinct genes in a second species, the three genes and their corresponding products are considered to be orthologs. For the production of a biochemical product, those skilled in the art will understand that the orthologous gene harboring the metabolic activity to be introduced or disrupted is to be chosen for construction of the non-naturally occurring microorganism or cell extract. An example of orthologs exhibiting separable activities is where distinct activities have been separated into distinct gene products between two or more species or within a single species. A specific example is the separation of elastase proteolysis and plasminogen proteolysis, two types of serine protease activity, into distinct molecules as plasminogen activator and elastase. A second example is the separation of mycoplasma 5′-3′ exonuclease and Drosophila DNA polymerase III activity. The DNA polymerase from the first species can be considered an ortholog to either or both of the exonuclease or the polymerase from the second species and vice versa.

[0116] In contrast, paralogs are homologs related by, for example, duplication followed by evolutionary divergence and have similar or common, but not identical functions. Paralogs can originate or derive from, for example, the same species or from a different species. For example, microsomal epoxide hydrolase (epoxide hydrolase I) and soluble epoxide hydrolase (epoxide hydrolase II) can be considered paralogs because they represent two distinct enzymes, co-evolved from a common ancestor, that catalyze distinct reactions and have distinct functions in the same species. Paralogs are proteins from the same species with significant sequence similarity to each other suggesting that they are homologous, or related through co-evolution from a common ancestor. Groups of paralogous protein families include HipA homologs, luciferase genes, peptidases, and others.

[0117] A nonorthologous gene displacement is a nonorthologous gene from one species that can substitute for a referenced gene function in a different species. Substitution includes, for example, being able to perform substantially the same or a similar function in the species of origin compared to the referenced function in the different species. Although generally, a nonorthologous gene displacement will be identifiable as structurally related to a known gene encoding the referenced function, less structurally related but functionally similar genes and their corresponding gene products nevertheless will still fall within the meaning of the term as it is used herein. Functional similarity requires, for example, at least some structural similarity in the active site or binding region of a nonorthologous gene product compared to a gene encoding the function sought to be substituted. Therefore, a nonorthologous gene includes, for example, a paralog or an unrelated gene.

[0118] Therefore, in identifying and constructing the non-naturally occurring microbial organisms or cell extracts used in the invention having lasso peptide biosynthetic capability, those skilled in the art will understand with applying the teaching and guidance provided herein to a particular species that the identification of metabolic modifications can include identification and inclusion or inactivation of orthologs. To the extent that paralogs and/or nonorthologous gene displacements are present in the referenced microorganism that encode an enzyme catalyzing a similar or substantially similar metabolic reaction, those skilled in the art also can utilize these evolutionally related genes.

[0119] Orthologs, paralogs and nonorthologous gene displacements can be determined by methods well known to those skilled in the art. For example, inspection of nucleic acid or amino acid sequences for two polypeptides will reveal sequence identity and similarities between the compared sequences. Based on such similarities, one skilled in the art can determine if the similarity is sufficiently high to indicate the proteins are related through evolution from a common ancestor. Algorithms well known to those skilled in the art, such as Align, BLAST, Clustal W and others compare and determine a raw sequence similarity or identity, and also determine the presence or significance of gaps in the sequence which can be assigned a weight or score. Such algorithms also are known in the art and are similarly applicable for determining nucleotide sequence similarity or identity. Parameters for sufficient similarity to determine relatedness are computed based on well-known methods for calculating statistical similarity, or the chance of finding a similar match in a random polypeptide, and the significance of the match determined. A computer comparison of two or more sequences can, if desired, also be optimized visually by those skilled in the art. Related gene products or proteins can be expected to have a high similarity, for example, 25% to 100% sequence identity. Proteins that are unrelated can have an identity which is essentially the same as would be expected to occur by chance, if a database of sufficient size is scanned (about 5%). Sequences between 5% and 24% may or may not represent sufficient homology to conclude that the compared sequences are related. Additional statistical analysis to determine the significance of such matches given the size of the data set can be carried out to determine the relevance of these sequences.

[0120] Exemplary parameters for determining relatedness of two or more sequences using the BLAST algorithm, for example, can be as set forth below. Briefly, amino acid sequence alignments can be performed using BLASTP version 2.0.8 (Jan. 5, 1999) and the following parameters: Matrix: 0 BLOSUM62; gap open: 11; gap extension: 1; x_dropoff: 50; expect: 10.0; wordsize: 3; filter on. Nucleic acid sequence alignments can be performed using BLASTN version 2.0.6 (Sep. 16, 1998) and the following parameters: Match: 1; mismatch: −2; gap open: 5; gap extension: 2; x_dropoff: 50; expect: 10.0; wordsize: 11; filter off. Those skilled in the art will know what modifications can be made to the above parameters to either increase or decrease the stringency of the comparison, for example, and determine the relatedness of two or more sequences.

[0121] The term “partially” means that something takes place, as a function or activity, to provide the expected outcome or result in part and to a limited extent, not to the fullest extent. For example, if a lasso peptide is partially purified, the lasso peptide is isolated and purification steps afford the lasso peptide at purity level that is greater than about 20% and less than about 90%.

[0122] The term “substantially” means that something takes place, as a function or activity, to provide the expected outcome or result to a large degree and to a great extent, but still not to the fullest extent. For example, if a lasso peptide is substantially purified, the lasso peptide is isolated and purification steps afford the lasso peptide at purity level above 90% and as high as 99.99%.

[0123] The terms “plasmid” and “vector” are used interchangeably herein and refer to genetic constructs that incorporate genes of interest, along with regulatory components such as promoters, ribosome binding sites, and terminator sequences, along with a compatible origin of replication and a selectable marker (e.g., an antibiotic resistance gene), and which facilitate the cloning and expression of genes (e.g., from a lasso peptide biosynthetic pathway).

[0124] Provided herein are methods for the production of lasso peptides, lasso peptide analogs and lasso peptide libraries using cell-free biosynthesis systems and a minimal set of lasso peptide biosynthesis components. Also, provided herein are methods for the discovery of lasso peptides from Nature using cell-free biosynthesis systems and a minimal set of lasso peptide biosynthesis components. Also, provided herein are methods for the mutagenesis and production of lasso peptide variants using cell-flee biosynthesis systems and a minimal set of lasso peptide biosynthesis components. Also, provided herein are methods for optimization of lasso peptides using cell-flee biosynthesis systems and a minimal set of lasso peptide biosynthesis components.

[0125] The present invention provides herein methods for the synthesis of lasso peptides or lasso peptide analogs involving in vitro cell-free biosynthesis (CFB) systems that employ the enzymes and the biosynthetic and metabolic machinery present inside cells, but without using living cells. Cell-free biosynthesis systems provided herein for the production of lasso peptides and lasso peptide analogs have numerous applications for drug discovery. For example, cell-free biosynthesis systems allow rapid expression of natural biosynthetic genes and pathways and facilitate targeted or phenotypic activity screening of natural products, without the need for plasmid-based cloning or in vivo cellular propagation, thus enabling rapid process/product pipelines (e.g., creation of large lasso peptide libraries). A key feature of the CFB methods and systems provided herein for lasso peptide production is that oligonucleotides (linear or circular constructs of DNA or RNA) encoding a minimal set of lasso peptide biosynthesis pathway genes (e.g., lasso peptide genes A-C) may be added to a cell extract containing the biosynthetic machinery for transcribing and translating the minimal set of genes into the essential enzymes and lasso precursor peptides for production of lasso peptides and lasso peptide analogs.

[0126] Methods provided herein include cell-free (in vitro) biosynthesis (CFB) methods for making, synthesizing or altering the structure of lasso peptides. The CFB compositions, methods, systems, and reaction mixtures can be used to rapidly produce analogs of known compounds, for example lasso peptide analogs. Accordingly, the CFB methods can be used in the processes described herein that generate lasso peptide diversity. The CFB methods can produce in a CFB reaction mixture at least two or more of the altered lasso peptides to create a library of lasso peptides; preferably the library is a lasso peptide analog library, prepared, synthesized or modified by the CFB method or the present invention.

[0127] There are numerous benefits associated with using cell-free biosynthesis methods and systems for production of lasso peptides and lasso peptide analogs from a minimal set of lasso peptide biosynthesis components. When considering the analysis of large genomic databases that contain sequence information corresponding to lasso peptide biosynthetic genes and pathways, the minimal set of biosynthesis genes are predicted and then cloned, if the native organism is known and available. Alternatively, the minimal set of lasso peptide biosynthetic genes may be synthesized faster and cheaper as linear DNA or as plasmid-based genes. Production of a lasso peptide may then take place in cells, through cloning of the genes into a series of vectors in different configurations, followed by transformation of the vectors into appropriate host cells, growing the host cells with different vector configurations, and screening for host cells and conditions that lead to lasso peptide production. Cell-based production of lasso peptides can take months to enable. By contrast cell-free biosynthesis of lasso peptides requires no time-consuming cloning, plasmid propogation, transformation, in vivo selection or cell growth steps, but rather simply involves addition of the lasso peptide biosynthesis components (e.g., genes, as linear or circular DNA, or on plasmids), into a CFB reaction mixture containing supplemented cell extract, and lasso peptide production can occur in hours. Thus, one major benefit of cell-free biosynthesis of lasso peptides is speed (months for cell-based vs hours for cell-free). The specific lasso peptides and lasso peptide analogs formed when using the CFB methods and systems are defined by the input genes. Thus, CFB methods and systems for lasso peptide production, as described herein, lead only to formation of the desired lasso precursor peptides and lasso peptides of interest, which greatly facilitates isolation and purification of the desired lasso peptides and lasso peptide analogs. In addition, by using the CFB method, biosynthesis pathway flux to the target compound, such as lasso peptides, can be optimized by directing resources (e.g., carbon, energy, and redox sources) to production of the lasso peptides rather than supporting cellular growth and maintenance of the cells. Moreover, central metabolism, oxidative phosphorylation, and protein synthesis can be co-activated by the user, for example to recycle ATP, NADH, NADPH, and other co-factors, without the need to support cellular growth and maintenance. The lack of a cell wall precludes membrane transport limitations that can occur when using cells, provides for the ability to easily screen metabolites, proteins, and products (e.g., lasso peptides) by direct sampling, and also can allow production of products that ordinarily would be toxic or inhibitory to cell growth and survival. Finally, since no cells are involved, a cell-free biosynthesis processes can be conducted easily using liquid handling and robotic automation in order to enable high throughput biosynthesis of products, such as lasso peptides or lasso peptide analogs. FIG. 5 illustrates a comparison between cell-based and cell-free biosynthesis of lasso peptides.

### 5.3 Lasso Peptides

[0128] Bacterially-derived lasso peptides are emerging as a class of natural molecular scaffolds for drug design (Hegemann, J. D. et al., Acc. Chem. Res., 2015, 48, 1909-1919; Zhao, N., et al., Amino Acids, 2016, 48, 1347-1356; Maksimov, M. O., et al., Nat. Prod. Rep., 2012, 29, 996-1006). Lasso peptides are members of the larger class of natural ribosomally synthesized and post-translationally modified peptides (RiPPs). Lasso peptides are derived from a precursor peptide, comprising a leader sequence and core peptide sequence, which is cyclized through formation of an isopeptide bond between the N-terminal amino group of the linear core peptide and the side chain carboxyl groups of glutamate or aspartate residues located at positions 7, 8, or 9 of the linear core peptide. The resulting macrolactam ring is formed around the C-terminal linear tail, which is threaded through the ring leading to the characteristic lasso (also referred to as lariat) topology of general structure 1 as shown in FIG. 1, which is held in place through sterically bulky side chains above and below the plane of the ring, and sometimes containing disulfide bonds between the tail and the ring or alternatively only in the tail.

[0129] Lasso peptide gene clusters typically consist of three main genes, one coding for the precursor peptide (referred to as Gene A), and two for the processing enzymes, a lasso peptidase (referred to as Gene B) and a lasso cyclase (referred to as Gene C) that close the macrolactam ring around the tail to form the unique lariat structure. The precursor peptide consists of a leader sequence that binds to and directs the enzymes that carry out the cyclization reaction, and a core peptide sequence which contains the amino acids that together form the nascent lasso peptide upon cyclization. In addition, most lasso peptide gene clusters contain additional genes, such as those that encode for a small facilitator protein called a RIPP recognition element (RRE), those that encode for lasso peptide transporters, those that encode for kinases, or those that encode proteins that are believed to play a role in immunity, such as an isopeptidase (Burkhart, B. J., et al., Nat. Chem. Biol., 2015, 11, 564-570; Knappe, T. A. et al., J. Am. Chem. Soc., 2008, 130, 11446-11454; Solbiati, J. O. et al. J. Bacteriol., 1999, 181, 2659-2662; Fage, C D., et al., Angew. Chem. Int. Ed., 2016, 55, 12717-12721; Zhu, S., et al., J. Biol. Chem. 2016, 291, 13662-13678).

[0130] The ultimate lasso peptide directly derives from a core peptide that typically comprises a linear sequence ranging from about 11-50 amino acids in length. The macrolactam ring of a lasso peptide may contain 7, 8, or 9 amino acids, while the loop and tail vary in length. FIG. 2 shows an example of the general structure of a 26-mer linear core peptide corresponding to a lasso peptide.

[0131] Lasso peptides embody unique characteristics that are relevant to their potential utility as robust scaffolds for the development of drugs, agricultural and consumer products. Unique features of lasso peptides include: (1) small (1.5-3.0 kDa), compact, topologically unique and diverse structures, with rings, loops, folds, and tails that present amino acid residues in constrained conformations for receptor binding, (2) extraordinary stability against proteolytic degradation, high temperature, low pH and chemical denaturants; (3) gene-encoded lasso peptide precursor peptides; (4) gene clusters of bacterial origin allowing heterologous production in bacterial strains such as E. coli; (5) promiscuous biosynthetic machinery and lasso folding which tolerates amino acid substitutions at up to 80% of positions within the lasso peptide sequence, (6) ability to accept receptor epitope binding motifs grafted within the lasso structure in order to enhance potency and specificity for receptor binding, (7) ability to be further processed by biochemical or chemical means following lasso formation, and (8) ability to form fusion products using the free C-terminal tail of lasso peptides.

[0132] Historically, the barriers to lasso peptide development have included: (1) long, tedious, and costly extraction and fractionation processes for the discovery of new natural lasso peptides, (2) low yield or no production of lasso peptides by native hosts, (3) challenges associated with accurately predicting small lasso peptide gene clusters and precursor peptide genes within large genomic sequence datasets, (4) low throughput associated with cloning of lasso peptide biosynthetic gene clusters and poor yields in production of lasso peptides using common heterologous hosts, (5) lack of compelling demonstration of unique biological activities that address unmet needs, and (6) requirement for biosynthetic production of lasso peptides, which cannot be produced with the lasso topology by standard chemical peptide synthesis methods.

[0133] A genomic sequence mining algorithm called RODEO, has enabled identification of over 1300 entirely new lasso peptide gene clusters associated with a broad range of different bacterial species in the GenBank database, which is a vast increase over the 38 lasso peptides previously described in the literature (Tietz, J. I., et al., Nature Chem Bio, 2017, 13, 470-478). Previous genome mining tools struggled to identify lasso peptide biosynthetic gene clusters due to the small size of the gene clusters and particularly the precursor peptide genes (Hegemann, J. D., et al., Biopolymers, 2013, 100, 527-542; Maksimov, M O., et al., Proc. Nat. Acad Sci., 2012, 109, 15223-15228). This study also demonstrated that lasso peptides are much more widespread in Nature than previously expected.

[0134] A large percentage (>95%) of recently identified lasso peptide biosynthesis gene clusters have not been transformed into molecules, but rather remain as prophetic entities predicted on the basis of genome sequence analyses. Lasso peptide development is severely constrained by the lack of effective methods to rapidly convert virtual lasso peptide biosynthetic gene cluster sequences into actual molecules that can be characterized and screened for biological activity. Provided herein are methods and systems that enable the discovery, production, and optimization of lasso peptides and catalyze development of these unique peptide products for useful pharmaceutical, agricultural, and consumer applications.

[0135] Naturally, lasso peptides are a unique class of ribosomally synthesized peptides produced by, for example, bacteria. In bacteria, lasso peptide gene clusters often include genes for functions such as transporters and immunity, which, in addition to the lasso biosynthesis pathway genes, are used for producing lasso peptides inside cells. These additional genes can be eliminated since transport, immunity, and other functions not directly linked to biosynthesis are superfluous in a cell-free system. Accordingly, systems and related methods of the present disclosure enable the rapid biosynthesis of lasso peptides from a minimal set of lasso peptide biosynthesis components (e.g., enzymes, proteins, peptides, genes and/or oligonucleotide sequences) using the in vitro cell-free biosynthesis (CFB) system as provided herein. Relative to lasso peptide production in cells, the use of a cell-free biosynthesis system not only simplifies the process, lowers cost, and greatly reduces the time for lasso peptide production and screening, but also enables the use of liquid handling and robotic automation in order to generate large libraries of lasso peptides and lasso peptide analogs in a high throughput manner. Additionally, the methods as provided herein enable the rapid evolution of lasso peptides to improve or optimize specific properties of interest, such as solubility, cell membrane permeability, metabolic stability, and pharmacokinetics. The present systems and methods thus enable the discovery and optimization of candidate lasso peptides and lasso peptide analogs for use in pharmaceutical, agricultural, and consumer applications. FIG. 3 shows the process of discovering lasso peptide encoding genes by genomic mining, and cell-free biosynthesis of lasso peptide.

### 5.4 Cell-Free Biosynthesis (CFB) Systems and Methods

[0136] In one aspect, provided herein are systems and related methods for producing lasso peptides or lasso peptide analogs through in vitro cell-free biosynthesis (CFB).

[0137] Cell-free methods, and especially cell-free protein synthesis methods, have been established and used as a technology to produce proteins froms single genes and to devise and prototype genetic circuits (Hodgman, C. E., Jewett, M. C., Metab. Eng., 2012, 14(3), 261-269). CFB methods and systems involve the production and/or use of at least two proteins or enzymes, which together interact and may serve as catalysts that lead to formation an independent third entity which is not a direct product of the input genes, but which is the final isolated product of interest. In a CFB method involving in vitro transcription and translation (TX-TL), protein or enzyme production can be accomplished directly from the corresponding oligonucleotides (RNA or DNA), including linear or plasmid-based DNA. The CFB methods and systems enable the user to modulate the concentrations of encoding DNA inputs in order to deliver individual pathway enzymes in the right ratios to optimally carry out production of a desired product. The ability to express multi-enzyme pathways using linear DNA in the CFB methods and systems bypasses the need for time-consuming steps such as cloning, in vivo selection, propagation of plasmids, and growth of host organisms. Linear DNA fragments can be assembled in 1 to 3 hours (hrs) via isothermal or Golden Gate assembly techniques and can be immediately used for a CFB reaction. The CFB reaction can take place to deliver a desired product in several hours, e.g. approximately 4-8 hours, or may be run for longer periods up to 48 hours. The use of linear DNA provides a valuable platform for rapidly prototyping libraries of DNA/genes. In the CFB methods and systems, mechanisms of regulation and transcription exogenous to the extract host, such as the tet repressor and T7 RNA polymerase, can be added as a supplement to CFB reaction mixtures and cell extracts in order to optimize the CFB system properties, or improve compound diversity or elevate production levels. The CFB methods and systems can be optimized to further enhance diversity and production of target compounds by modifying properties such as mRNA and DNA degradation rates, as well as proteolytic degradation of peptides and pathway enzymes. ATP regeneration systems that allow for the recycling of inorganic phosphate, a strong inhibitor of protein synthesis, also can be manipulated in the CFB methods and systems (Wang, Y., et al, BMC Biotechnology, 2009, 9:58 doi:10.1186/1472-6750-9-58). Redox co-factors and ratios, including e.g., NAD/NADH, NADP/NADPH, can be regenerated and controlled in CFB systems (Kay, J., et al., Metabolic Engineering, 2015, 32, 133-142).

[0138] As defined and used herein, cell-free biosynthesis methods and systems are to be distinguished from cell-free protein production systems. Cell-free protein production involves the addition of a single gene to a cell extract, whereby the gene is transcribed and translated to afford a single protein of interest, which is not necessarily catalytically active, and which is the final isolated product. Cell-free protein production methods have been used to produce: (1) proteins (Carlson, E. D., et al., Biotechnol. Adv., 2012, 30(5), 1185-1194; Swartz, J., et al., U.S. Pat. No. 7,338,789; Goerke, A. R., et al., U.S. Pat. No. 8,715,958), and (2) antibodies and antibody analogs (Zimmerman, E. S., et al., Bioconjugate Chem., 2014, 25, 351-361; Thanos, C. D., et al., US Patent No. 2015/0017187 A1).

[0139] By contrast, CFB methods involve the production and/or use of at least two proteins or enzymes, which together interact and may serve as catalysts that lead to formation an independent third entity, which is not a direct product of the input genes, but which is the final isolated product of interest. Cell-free biosynthesis methods involve the use of multistep biosynthesis pathways that may encompass: (i) the use of at least two isolated proteins or enzymes added to a CFB reaction mixture to produce a third independent product, (ii) the use of at least one gene and one protein or enzyme added to a CFB reaction mixture to produce a third independent product, or (iii) the use of at least two genes added to a CFB reaction mixture to produce a third independent product. The CFB methods (ii) and (iii) above involve the addition of genes to the CFB reaction mixture, and thus require the genes to undergo in vitro transcription and translation (TX-TL) to yield the peptides, proteins or enzymes to form the desired independent product of interest (e.g., a small molecule that is not a direct product of the input genes). CFB processes recently have been used for the production of small molecules (1,3-Butanediol-Kay, J., et al., Metabolic Engineering, 2015, 32, 133-142; Carbapenem-Blake, W. J., et al., U.S. Pat. No. 9,469,861). However, these reports do not implement CFB methods involving TX-TL, and cell-free biosynthesis methods involving TX-TL have not been implemented for the production of lasso peptides or lasso peptide analogs using a minimal set of lasso peptide biosynthesis components, as described herein.

[0140] In some embodiments, for the CFB methods to function, the expressed enzymes in the CFB system fold and function properly with other additional components (e.g., trace metals, chaperons, precursors, recycled co-factors, and recycled energy molecules) for the biosynthetic pathway to form the desired product. In some embodiments, a CFB reaction mixtures comprise optimized cell extracts that provide these components along with the transcription and translation machinery that: (i) accepts the accessible oligonucleotide codon usage (e.g., GC content >60%), and (ii) can transcribe small and large genes (e.g., >3 kilobases) and translate and properly fold small and large proteins (e.g., >100 kDa). Most cell extracts described in the literature or available commercially for in vitro expression have been optimized for cell-free protein synthesis, not for cell-free biosynthesis (Hoffmann, M., et al., Biotech. Ann. Rev., 2004, 10, 1-29; Gagoski, D., et al., Biotechnol. Bioeng., 2016; 113: 292-300; Shimizu, Y., et al., Cell-Free Protein Production: Methods and Protocols, in Methods in Molecular Biology, Y. Endo et al. (eds.), vol. 607, Chapter 2, pp 11-21, Springer New York, 2010; Takai, K, et al., Nature Protocols, 2010, 5, 227-238; Li, J., et al., PLoS ONE, 2014, 9, e106232. doi:10.1371/journal.pone.0106232; Kigawa, T., et al., J. Struct. Functional Genomics, 2004, 5, 63-68; see also website of Promega Corporation (Fitchburg Center, Wis., USA) at www.promega.com). Descriptions and comparisons of the performance of cell extracts derived from different cell types have been reported (Carlson, E. D., et al., Biotechnol. Adv., 2012, 30(5), 1185-1194; Gagoski, D., et al., Biotechnol. Bioeng., 2016; 113: 292-300).

[0141] CFB methods and systems provided herein for the synthesis of lasso peptides and lasso peptide analogs from a minimal set of lasso peptide biosynthesis components, are conducted in a CFB reaction mixture, comprising one or more cell extracts that are supplemented with all twenty proteinogenic naturally occurring amino acids and corresponding transfer ribonucleic acids (tRNAs). Cell extracts used in the CFB reaction mixture, provided herein for the synthesis of lasso peptides and lasso peptide analogs from a minimal set of lasso peptide biosynthesis components also may be supplemented with additional components, including but not limited to, glucose, xylose, fructose, sucrose, maltose, starch, adenosine triphosphate (ATP), and/or adenosine diphosphate (ADP), purine and guanidine nucleotides, adenosine triphosphate, guanosine triphosphate, cytosine triphosphate, and uridine triphosphate, cyclic-adenosine monophosphate (cAMP) and/or 3-phosphoglyceric acid (3-PGA), nicotimamide adenine dinucleotides NADH and/or NAD, or nicotimamide adenine dinucleotide phosphates, NADPH, and/or NADP, or combinations thereof, amino acid salts such as magnesium glutamate and/or potassium glutamate, buffering agents such as HEPES, TRIS, spermidine, or phosphate salts, inorganic salts, including but not limited to, potassium phosphate, sodium chloride, magnesium phosphate, and magnesium sulfate, folinic acid and co-enzyme A (CoA), crowding agents such as PEG 8000, Ficoll 70, or Ficoll 400, L(−)-5-formyl-5,6,7,8-tetrahydrofolic acid, RNA polymerase, biotin, 1,4-dithiothreitol (DTT), magnesium acetate, ammonium acetate, or combinations thereof. For a general description of cell-free extract production and preparation. (Krinsky, N., et al., PLoS ONE, 2016, 11(10): e0165137).

[0142] In some embodiments, the CFB system employs the enzymes, and the biosynthetic and metabolic machinery of a cell, without using a living cell. The present CFB systems and related methods provided herein for the production of lasso peptides and lasso peptide analogs have numerous applications for drug discovery involving rapid expression of lasso peptide biosynthetic genes and pathways and by allowing targeted or phenotypic activity screening of lasso peptides and lasso peptide analogs, without the need for plasmid-based cloning or in vivo cellular propagation, thus enabling rapid process/product pipelines (e.g., creation of large lasso peptide libraries). The CFB methods and systems provided herein for lasso peptide production have the feature that oligonucleotides (linear or circular constructs of DNA or RNA) encoding a minimal set of lasso peptide biosynthetic pathway genes (e.g., Genes A-C) may be added to a cell extract containing the biosynthetic machinery for transcribing and translating the genes into precursor peptide and the enzymes for processing the lasso precursor peptide into a lasso peptide. By using a CFB system, biosynthesis pathway flux to the target compound can be optimized by directing resources (e.g., carbon, energy, and redox sources) to user-defined objectives. Thus, central metabolism, oxidative phosphorylation, and protein synthesis can be co-activated by the user without the need to support cellular growth and maintenance. The lack of a cell wall also provides for the ability to easily screen metabolites, proteins, and products (e.g., lasso peptides) that are toxic or inhibitory to cell growth and survival. Finally, since no cells are involved, cell-free biosynthesis reactions or processes can be conducted using liquid handling and robotic automation in order to enable high throughput synthesis of products, such as lasso peptide and lasso peptide analog libraries. FIG. 4 illustrates cell-free biosynthesis of lasso peptides using in vitro transcription/translation, and construction of a lasso peptide library for screening of activities.

[0143] In certain embodiments, cell-free biosynthesis methods and systems described herein are used to produce lasso peptides and lasso peptide analogs by combining and contacting a minimal set of lasso peptide biosynthesis components, including, for example: (1) isolated precursor peptides or precursor peptide fusions, combined together and contacted with isolated proteins that include a lasso peptidase and a lasso cyclase, or fusions thereof, (2) oligonucleotides (linear or circular constructs of DNA or RNA) that encode for precursor peptides or precursor peptide fusions, combined together and contacted with isolated proteins that include a lasso peptidase and a lasso cyclase, or fusions thereof, (3) isolated precursor peptides or precursor peptide fusions, combined together and contacted with oligonucleotides that encode for a lasso peptidase and a lasso cyclase, or fusions thereof, (4) oligonucleotides that encode for precursor peptides, a lasso peptidase, and a lasso cyclase, or fusions thereof, combined together and contacted, (5) isolated core lasso peptides combined and contacted with isolated lasso cyclases, or fusions thereof, (6) oligonucleotides that encode for core lasso peptides combined and contacted with isolated lasso cyclases, or fusions thereof, or (7) oligonucleotides that encode for core lasso peptides combined and contacted with oligonucleotides that encode for lasso cyclases, or fusions thereof, in a cell-free reaction mixture.

[0144] In some embodiments, the CFB system comprises the biosynthetic and metabolic machinery of a cell, without using a living cell. In some embodiments, the CFB system comprises a CFB reaction mixture as provided herein. In some embodiments, the CFB system comprises a cell extract as provided. In some embodiments, the cell extract is derived from prokaryotic cells. In some embodiments, the cell extract is derived from eukaryotic cells. In some embodiments, the CFB system comprises a supplemented cell extract provided herein. In some embodiments, the CFB system comprises in vitro transcription and translation machinery as provided herein.

[0145] In some embodiments, the CFB system comprises a minimal set of lasso peptide biosynthesis components. In some embodiments, the minimal set of lasso peptide biosynthesis components are capable of producing a lasso peptide or a lasso peptide analog of interest without the help of any additional substance of functionality. In some embodiments, the minimal set of lasso peptide biosynthesis components comprises at least one component that functions to provide a lasso precursor peptide and at least one component that functions to process the lasso precursor peptide into a lasso peptide or a lasso peptide analog. In some embodiments, the minimal set of lasso peptide biosynthesis components comprises at least one component that functions to provide a lasso core peptide and at least one component that functions to process the lasso core peptide into a lasso peptide or a lasso peptide analog.

[0146] In some embodiments, the CFB system comprises a minimal set of lasso peptide biosynthesis components. In particular embodiments, the minimal set of lasso peptide biosynthesis components comprises at least one component that functions to produce a lasso precursor peptide. In particular embodiments, the minimal set of lasso peptide biosynthesis components comprises at least one component that functions to produce a lasso core peptide. In particular embodiments, the minimal set of lasso peptide biosynthesis components comprises at least one component that functions to produce a lasso peptidase. In particular embodiments, the minimal set of lasso peptide biosynthesis components comprises at least one component that functions to produce a lasso cyclase. In particular embodiments, the minimal set of lasso peptide biosynthesis components comprises at least one component that functions to produce a RIPP recognition element (RRE). In particular embodiments, the minimal set of lasso peptide biosynthesis components comprises at least one component that functions to produce (i) a lasso precursor peptide, (ii) a lasso peptidase, and (iii) a lasso cyclase. In particular embodiments, the minimal set of lasso peptide biosynthesis components comprises at least one component that functions to produce (i) a lasso precursor peptide, (ii) a lasso peptidase, (iii) a lasso cyclase, and (iv) an RRE. In particular embodiments, the minimal set of lasso peptide biosynthesis components comprises at least one component that functions to produce (i) a lasso core peptide, and (ii) a lasso cyclase. In particular embodiments, the minimal set of lasso peptide biosynthesis components comprises at least one component that functions to produce (i) a lasso core peptide, (ii) a lasso cyclase; and (iii) an RRE.

[0147] In some embodiments, the component functions to produce a peptide or polypeptide (e.g., a lasso precursor peptide, a lasso peptidase, or a lasso cyclase) in the minimal set of lasso peptide biosynthesis components comprises the peptide or polypeptide to be produced. In some embodiments, the component functions to produce a peptide or polypeptide (e.g., a lasso precursor peptide, a lasso peptidase, or a lasso cyclase) in the minimal set of lasso peptide biosynthesis components comprises a polynucleotide encoding such peptide or polypeptide. In some embodiments, the component functions to produce a peptide or polypeptide (e.g., a lasso precursor peptide, a lasso peptidase, or a lasso cyclase) in the minimal set of lasso peptide biosynthesis components is the peptide or polypeptide to be produced. In some embodiments, the component functions to produce a peptide or polypeptide (e.g., a lasso precursor peptide, a lasso peptidase, or a lasso cyclase) in the minimal set of lasso peptide biosynthesis components is a polynucleotide encoding such peptide or polypeptide. In some embodiments, the component functions to produce a peptide or polypeptide (e.g., a lasso precursor peptide, a lasso peptidase, or a lasso cyclase) in the minimal set of lasso peptide biosynthesis components comprises a polynucleotide encoding such peptide or polypeptide, and the minimal set of lasso peptide biosynthesis components further comprises in vitro TX-TL machinery capable of producing such peptide or polypeptide from the polynucleotide encoding such peptide or polypeptide.

[0148] In certain embodiments, the CFB systems described herein are used to produce lasso peptides and lasso peptide analogs by combining and contacting a minimal set of lasso peptide biosynthesis components, including, for example: (1) isolated precursor peptides or precursor peptide fusions, combined together and contacted with isolated proteins that include a lasso peptidase and a lasso cyclase, or fusions thereof, (2) oligonucleotides (linear or circular constructs of DNA or RNA) that encode for precursor peptides or precursor peptide fusions, combined together and contacted with isolated proteins that include a lasso peptidase and a lasso cyclase, or fusions thereof, (3) isolated precursor peptides or precursor peptide fusions, combined together and contacted with oligonucleotides that encode for a lasso peptidase and a lasso cyclase, or fusions thereof, (4) oligonucleotides that encode for precursor peptides, a lasso peptidase, and a lasso cyclase, or fusions thereof, combined together and contacted, (5) isolated core lasso peptides combined and contacted with isolated lasso cyclases, or fusions thereof, (6) oligonucleotides that encode for core lasso peptides combined and contacted with isolated lasso cyclases, or fusions thereof, or (7) oligonucleotides that encode for core lasso peptides combined and contacted with oligonucleotides that encode for lasso cyclases, or fusions thereof, in a cell-free reaction mixture.

[0149] Particularly, in some embodiments, the CFB system comprises one or more components that function to provide a lasso precursor peptide. In some embodiments, the one or more components that function to provide the lasso precursor peptide comprise the lasso precursor peptide. In some embodiments, the one or more components that function to provide the lasso precursor peptide comprise a nucleic acid encoding the lasso precursor peptide and in vitro TX-TL machinery.

[0150] In some embodiments, the CFB system comprises one or more components that function to provide a lasso peptidase. In some embodiments, the one or more components that function to provide the lasso peptidase comprise the lasso peptidase. In some embodiments, the one or more components that function to provide the lasso peptidase comprise a nucleic acid encoding the lasso peptidase and in vitro TX-TL machinery.

[0151] In some embodiments, the CFB system comprises one or more components that function to provide a lasso cyclase. In some embodiments, the one or more components that function to provide the lasso cyclase comprise the lasso cyclase. In some embodiments, the one or more components that function to provide the lasso cyclase comprise a nucleic acid encoding the lasso cyclase and in vitro TX-TL machinery.

[0152] In some embodiments, the CFB system comprises one or more components that function to provide a RIPP recognition element (RRE). In some embodiments, the one or more components that function to provide the RRE comprise the RRE. In some embodiments, the one or more components that function to provide the lasso cyclase comprise a nucleic acid encoding the RRE and in vitro TX-TL machinery.

[0153] In some embodiments, the CFB system comprises one or more components that function to provide a lasso core peptide. In some embodiments, the one or more components that function to provide the lasso core peptide comprise the lasso core peptide. In some embodiments, the one or more components that function to provide the lasso core peptide comprise a nucleic acid encoding the lasso core peptide and in vitro TX-TL machinery.

[0154] In some embodiments, the CFB system comprises (i) a nucleic acid encoding the lasso precursor peptide; (ii) a nucleic acid encoding the lasso peptidase; (iii) a nucleic acid encoding the lasso cyclase; and (iv) in vitro TX-TL machinery. In some embodiments, the CFB system comprises (i) a nucleic acid encoding the lasso precursor peptide; (ii) a lasso peptidase; (iii) a nucleic acid encoding the lasso cyclase; and (iv) in vitro TX-TL machinery. In some embodiments, the CFB system comprises (i) a nucleic acid encoding the lasso precursor peptide; (ii) a nucleic acid encoding the lasso peptidase; (iii) a lasso cyclase; and (iv) in vitro TX-TL machinery. In some embodiments, the CFB system comprises (i) a nucleic acid encoding the lasso precursor peptide; (ii) a lasso peptidase; (iii) a lasso cyclase; and (iv) in vitro TX-TL machinery. In some embodiments, the CFB system comprises (i) a lasso precursor peptide; (ii) a lasso peptidase; and (iii) a lasso cyclase. In some embodiments, the CFB system comprises (i) a precursor peptide; (ii) a lasso peptidase; (iii) a nucleic acid encoding the lasso cyclase; and (iv) in vitro TX-TL machinery. In some embodiments, the CFB system comprises (i) a lasso precursor peptide; (ii) a nucleic acid encoding the lasso peptidase; (iii) a lasso cyclase; and (iv) in vitro TX-TL machinery. In some embodiments, the CFB system comprises (i) a lasso precursor peptide; (ii) a nucleic acid encoding the lasso peptidase; (iii) a nucleic acid encoding the lasso cyclase; and (iv) in vitro TX-TL machinery.

[0155] In some embodiments, the CFB system comprises (i) a nucleic acid encoding the lasso precursor peptide; (ii) a nucleic acid encoding the lasso peptidase; (iii) a nucleic acid encoding the lasso cyclase; (iv) a nucleic acid encoding the RRE; and (v) in vitro TX-TL machinery. In some embodiments, the CFB system comprises (i) a nucleic acid encoding the lasso precursor peptide; (ii) a lasso peptidase; (iii) a nucleic acid encoding the lasso cyclase; (iv) a nucleic acid encoding the RRE; and (v) in vitro TX-TL machinery. In some embodiments, the CFB system comprises (i) a nucleic acid encoding the lasso precursor peptide; (ii) a nucleic acid encoding the lasso peptidase; (iii) a lasso cyclase; (iv) a nucleic acid encoding the RRE; and (v) in vitro TX-TL machinery. In some embodiments, the CFB system comprises (i) a nucleic acid encoding the lasso precursor peptide; (ii) a nucleic acid encoding the lasso peptidase; (iii) a nucleic acid encoding the lasso cyclase; (iv) a RRE; and (v) in vitro TX-TL machinery. In some embodiments, the CFB system comprises (i) a nucleic acid encoding the lasso precursor peptide; (ii) a lasso peptidase; (iii) a lasso cyclase; (iv) a nucleic acid encoding the RRE; and (v) in vitro TX-TL machinery. In some embodiments, the CFB system comprises (i) a nucleic acid encoding the lasso precursor peptide; (ii) a lasso peptidase; (iii) a nucleic acid encoding the lasso cyclase; (iv) a RRE; and (v) in vitro TX-TL machinery. In some embodiments, the CFB system comprises (i) a nucleic acid encoding the lasso precursor peptide; (ii) a nucleic acid encoding the lasso peptidase; (iii) a lasso cyclase; (iv) a RRE; and (v) in vitro TX-TL machinery. In some embodiments, the CFB system comprises (i) a nucleic acid encoding the lasso precursor peptide; (ii) a lasso peptidase; (iii) a lasso cyclase; (iv) a RRE; and (v) in vitro TX-TL machinery. In some embodiments, the CFB system comprises (i) a lasso precursor peptide; (ii) a nucleic acid encoding the lasso peptidase; (iii) a nucleic acid encoding the lasso cyclase; (iv) a nucleic acid encoding the RRE; and (v) in vitro TX-TL machinery. In some embodiments, the CFB system comprises (i) a lasso precursor peptide; (ii) a lasso peptidase; (iii) a nucleic acid encoding the lasso cyclase; (iv) a nucleic acid encoding the RRE; and (v) in vitro TX-TL machinery. In some embodiments, the CFB system comprises (i) a lasso precursor peptide; (ii) a nucleic acid encoding the lasso peptidase; (iii) a lasso cyclase; (iv) a nucleic acid encoding the RRE; and (v) in vitro TX-TL machinery. In some embodiments, the CFB system comprises (i) a lasso precursor peptide; (ii) a nucleic acid encoding the lasso peptidase; (iii) a nucleic acid encoding the lasso cyclase; (iv) a RRE; and (v) in vitro TX-TL machinery. In some embodiments, the CFB system comprises (i) a lasso precursor peptide; (ii) a lasso peptidase; (iii) a lasso cyclase; (iv) a nucleic acid encoding the RRE; and (v) in vitro TX-TL machinery. In some embodiments, the CFB system comprises (i) a lasso precursor peptide; (ii) a lasso peptidase; (iii) a nucleic acid encoding the lasso cyclase; (iv) a RRE; and (v) in vitro TX-TL machinery. In some embodiments, the CFB system comprises (i) a lasso precursor peptide; (ii) a nucleic acid encoding the lasso peptidase; (iii) a lasso cyclase; (iv) a RRE; and (v) in vitro TX-TL machinery. In some embodiments, the CFB system comprises (i) a lasso precursor peptide; (ii) a lasso peptidase; (iii) a lasso cyclase; and (iv) a RRE.

[0156] In some embodiments, the CFB system comprises (i) a nucleic acid encoding the lasso core peptide; (ii) a nucleic acid encoding the lasso cyclase; and (iii) in vitro TX-TL machinery. In some embodiments, the CFB system comprises (i) a nucleic acid encoding the lasso core peptide; (ii) a lasso cyclase; and (iii) in vitro TX-TL machinery. In some embodiments, the CFB system comprises (i) a lasso core peptide; (ii) a nucleic acid encoding the lasso cyclase; and (iii) in vitro TX-TL machinery. In some embodiments, the CFB system comprises (i) a lasso core peptide; and (ii) a cyclase.

[0157] In some embodiments, the CFB system comprises (i) a nucleic acid encoding the lasso precursor peptide; (ii) a nucleic acid encoding the lasso cyclase; (iii) a nucleic acid encoding the RRE; and (iv) in vitro TX-TL machinery. In some embodiments, the CFB system comprises (i) a nucleic acid encoding the lasso precursor peptide; (ii) a lasso cyclase; (iii) a nucleic acid encoding the RRE; and (iv) in vitro TX-TL machinery. In some embodiments, the CFB system comprises (i) a nucleic acid encoding the lasso precursor peptide; (ii) a nucleic acid encoding the lasso cyclase; (iii) a RRE; and (iv) in vitro TX-TL machinery. In some embodiments, the CFB system comprises (i) a nucleic acid encoding the lasso precursor peptide; (ii) a lasso cyclase; (iii) a RRE; and (iv) in vitro TX-11_, machinery. In some embodiments, the CFB system comprises (i) a lasso precursor peptide; (ii) a nucleic acid encoding the lasso cyclase; (iii) a nucleic acid encoding the RRE; and (iv) in vitro TX-TL machinery. In some embodiments, the CFB system comprises (i) a lasso precursor peptide; (ii) a lasso cyclase; (iii) a nucleic acid encoding the RRE; and (iv) in vitro TX-TL machinery. In some embodiments, the CFB system comprises (i) a lasso precursor peptide; (ii) a nucleic acid encoding the lasso cyclase; (iii) a RRE; and (iv) in vitro TX-TL machinery. In some embodiments, the CFB system comprises (i) a lasso precursor peptide; (ii) a lasso cyclase; and (iii) a RRE.

[0158] In some embodiments, the CFB system comprises one or more gene(s) of a lasso peptide gene cluster, or protein coding fragment thereof, or encoded product thereof. In some embodiments, the protein coding fragment is an open reading frame. In some embodiments, the CFB system comprises components that function to provide (i) at least one lasso precursor peptide having an amino acid sequence selected from the even number of SEQ ID Nos: 1-2630, or the corresponding core peptide fragment thereof (ii) at least one lasso peptidase having an amino acid sequence selected from peptide Nos: 1316-2336; (iii) at least one lasso cyclase having an amino acid sequence selected from peptide Nos: 2337-3761; (iv) at least one RRE having nucleic acid sequence selected from peptide Nos: 3762-4593; or (v) any combinations of (i) through (iv). In particular embodiments, the CFB system comprises components that function to provide at least one combination of one or more selected from a lasso precursor peptide, a lasso peptidase, a lasso cyclase and a RRE as shown in Table 2. In some embodiments, the components of a CFB system that function to provide a peptide or polypeptide having the amino acid sequence selected from peptide Nos: 1-4593 comprise the peptide or polypeptide having the amino acid sequence selected from peptide Nos: 1-4593 themselves. In other embodiments, the components of a CFB system that function to provide a peptide or polypeptide having the amino acid sequence selected from peptide Nos: 1-4593 comprises a polynucleotide encoding the peptide or polypeptide having the amino acid sequence selected from peptide Nos: 1-4593. Non-limiting examples of genomic sequences from specified microbial species that encode for the amino acid sequences having peptide Nos: 1-4593 are provided in Tables 3, 4 and 5, and the even numbers of SEQ ID Nos: 1-2630. Further, those skilled in the art would be readily capable of identifying and/or recognizing additional coding nucleic acid sequences, either synthetic or naturally-occurring in the same or different microbial organism as disclosed herein, using genetic tools well-known in the art.

[0159] In some embodiments, the CFB system comprises one or more components function to provide a fusion protein. In some embodiments, the one or more components function to provide the fusion protein comprise the fusion protein. In some embodiments, the one or more components function to provide the fusion protein comprise a polynucleotide encoding the fusion protein.

[0160] In some embodiments, the fusion protein comprised a lasso precursor peptide or a lasso core peptide fused to one or more additional peptide or polypeptide. In some embodiments, the one or more additional peptide or polypeptide is fused to the N-terminus of the lasso precursor peptide or lasso core peptide. In some embodiments, the one or more additional peptide or polypeptide is fused at the C-terminus of the lasso precursor peptide or lasso core peptide. In some embodiments, a polynucleotide encoding the fusion protein comprises a nucleic acid sequence encoding the lasso precursor peptide or the lasso core peptide, wherein the 5′ end of the nucleic acid sequence is linked to a nucleic acid sequence encoding the one or more additional peptide or polypeptide. In some embodiments, a polynucleotide encoding the fusion protein comprises a nucleic acid sequence encoding the lasso precursor peptide or the lasso core peptide, wherein the 3′ end of the nucleic acid sequence is linked to a nucleic acid sequence encoding the one or more additional peptide or polypeptide. In some embodiments, the fusion protein comprises an amino acid linker between the lasso precursor peptide or lasso core peptide and the one or more additional peptide or polypeptide. In some embodiments, the fusion protein does not comprise an amino acid linker between the lasso precursor peptide or lasso core peptide and the one or more additional peptide or polypeptide.

[0161] In some embodiments, the fusion protein comprised a lasso precursor peptide or a lasso core peptide fused to one or more additional peptide or polypeptide. In some embodiments, the one or more additional peptide or polypeptide comprises a peptide or polypeptide encoded by a lasso peptide gene cluster. Examples of peptide or polypeptide that can be fused with a lasso precursor peptide or a lasso core peptide according to the present disclosure include but are not limited to (i) a lasso precursor peptide, (ii) a lasso core peptide; (iii) a lasso peptidase; (iv) a lasso cyclase; (v) a RRE; or (vi) any combinations of (i) to (vi). In specific embodiments, the fusion protein comprises a lasso precursor peptide fused to a RRE. In specific embodiments, the fusion protein comprises a lasso core peptide fused to a RRE. In specific embodiments, the fusion protein comprises multiple lasso precursor peptides and/or lasso core peptides. In specific embodiments, at least one of the multiple lasso precursor peptides and/or lasso core peptides is different from another of the multiple lasso precursor peptide and/or lasso core peptide.

[0162] In some embodiments, the fusion protein comprised a lasso precursor peptide or a lasso core peptide fused to one or more additional peptide or polypeptide. In some embodiments, the one or more additional peptide or polypeptide comprises a peptide or polypeptide that facilitates production of the lasso precursor peptide or lasso core peptide or the lasso peptide derived therefrom through cell-free biosynthesis. Examples of peptide or polypeptide that can be fused with a lasso precursor peptide or a lasso core peptide according to the present disclosure include but are not limited to (i) a peptide or polypeptide that increases the level of transcription of the lasso precursor peptide or lasso core peptide in the CFB system; (ii) a peptide or polypeptide that increases the level of translation of the lasso precursor peptide or lasso core peptide in the CFB system; (iii) a peptide or polypeptide that facilitates the processing of the lasso precursor peptide or lasso core peptide into the lasso peptide; (iv) a peptide or polypeptide that improves stability of the lasso precursor peptide or lasso core peptide or the lasso peptide derived therefrom; (v) a peptide or polypeptide that improves solubility of the lasso precursor peptide or lasso core peptide or the lasso peptide derived therefrom; (vi) a peptide or polypeptide that enables or facilitates the detection of the lasso precursor peptide or lasso core peptide or the lasso peptide derived therefrom; (vii) a peptide or polypeptide that enables or facilitates purification of the lasso precursor peptide or lasso core peptide or the lasso peptide derived therefrom; (viii) a peptide or polypeptide that enables or facilitates immobilization of the lasso precursor peptide or lasso core peptide or the lasso peptide derived therefrom; or (ix) any combination of (i) to (viii).

[0163] In some embodiments, the fusion protein comprised a lasso precursor peptide or a lasso core peptide fused to one or more additional peptide or polypeptide. In some embodiments, the one or more additional peptide or polypeptide comprises a biologically active peptide or polypeptide. Examples of biologically active peptide or polypeptide that can be fused with a lasso precursor peptide or lasso core peptide according to the present disclosure include but are not limited to (i) a peptide or polypeptide capable of binding to a target molecule (e.g., an antibody or an antigen); (ii) a peptide or polypeptide that enhance cell permeability of the fusion protein; (iii) a peptide or polypeptide capable of conjugating the fusion protein to at least one additional copy of the fusion protein; (iv) a peptide or polypeptide capable of linking the fusion protein to one or more peptidic or non-peptidic molecule; (v) a peptide or polypeptide capable of modulating activity of the lasso precursor peptide or lasso core peptide; (vi) a peptide or polypeptide capable of modulating activity of the lasso peptide derived from the lasso precursor peptide or the lasso core peptide; or (vii) any combinations of (i) to (vi).

[0164] In some embodiments, the fusion protein comprised a lasso peptidase or a lasso cyclase fused to one or more additional peptide or polypeptide. In some embodiments, the one or more additional peptide or polypeptide is fused to the N-terminus of the lasso peptidase or the lasso cyclase. In some embodiments, the one or more additional peptide or polypeptide is fused at the C-terminus of the lasso peptidase or the lasso cyclase. In some embodiments, a polynucleotide encoding the fusion protein comprises a nucleic acid sequence encoding the lasso peptidase or the lasso cyclase, wherein the 5′ end of the nucleic acid sequence is linked to a nucleic acid sequence encoding the one or more additional peptide or polypeptide. In some embodiments, a polynucleotide encoding the fusion protein comprises a nucleic acid sequence encoding the lasso peptidase or the lasso cyclase, wherein the 3′ end of the nucleic acid sequence is linked to a nucleic acid sequence encoding the one or more additional peptide or polypeptide. In some embodiments, the fusion protein comprises an amino acid linker between the lasso peptidase or the lasso cyclase and the one or more additional peptide or polypeptide. In some embodiments, the fusion protein does not comprise an amino acid linker between the lasso peptidase or the lasso cyclase and the one or more additional peptide or polypeptide.

[0165] In some embodiments, the fusion protein comprised a lasso peptidase or a lasso cyclase fused to one or more additional peptide or polypeptide. In some embodiments, the more additional peptide or polypeptide comprises a peptide or polypeptide encoded by a lasso peptide gene cluster. Examples of peptide or polypeptide that can be fused with a lasso precursor peptide or a lasso core peptide according to the present disclosure include but are not limited to (i) a lasso precursor peptide; (ii) a lasso core peptide; (iii) a lasso peptidase; (iv) a lasso cyclase, (v) a RRE; or (vi) any combinations of (i) to (vi). In specific embodiments, the fusion protein comprises at least one lasso cyclase and at least one lasso peptidase. In specific embodiments, the fusion protein comprises at least one lasso cyclase fused to a RRE. In specific embodiments, the fusion protein comprises at least one lasso peptidase fused to a RRE.

[0166] In some embodiments, the fusion protein comprised a lasso peptidase or a lasso cyclase fused to one or more additional peptide or polypeptide. In some embodiments, the one or more additional peptide or polypeptide comprises a peptide or polypeptide that facilitates production of the lasso peptidase or lasso cyclase through cell-free biosynthesis. Examples of peptide or polypeptide that can be fused with the lasso peptidase or lasso cyclase according to the present disclosure include but are not limited to (i) a peptide or polypeptide that increases the level of transcription of the lasso peptidase or lasso cyclase in the CFB system; (ii) a peptide or polypeptide that increases the level of translation of the lasso peptidase or lasso cyclase in the CFB system; (iii) a peptide or polypeptide that improves stability of the lasso peptidase or lasso cyclase; (vi) a peptide or polypeptide that improves solubility of the lasso peptidase or lasso cyclase; (v) a peptide or polypeptide that enables or facilitates the detection of the lasso peptidase or lasso cyclase; (vi) a peptide or polypeptide that enables or facilitates purification of the lasso peptidase or lasso cyclase; (vii) a peptide or polypeptide that enables or facilitates immobilization of the lasso peptidase or lasso cyclase; or (viii) any combination of (i) to (vii).

[0167] In some embodiments, the fusion protein comprised a lasso peptidase or a lasso cyclase fused to one or more additional peptide or polypeptide. In some embodiments, the one or more additional peptide or polypeptide comprises a biologically active peptide or polypeptide. Examples of biologically active peptide or polypeptide that can be fused with a lasso peptidase or a lasso cyclase according to the present disclosure include but are not limited to (i) a peptide or polypeptide capable of modulating the reaction catalyzing activity of the lasso peptidase or lasso cyclase; (ii) a peptide or polypeptide capable of modulating target specificity of the lasso peptidase or lasso cyclase; (iii) an enzyme having the same or different enzymatic activity as the lasso peptidase or lasso cyclase; or any combination of (i) to (iii).

[0168] In some embodiments, the fusion protein comprised a RIPP recognition element (RRE) fused to one or more additional peptide or polypeptide. In some embodiments, the one or more additional peptide or polypeptide is fused to the N-terminus of the RRE. In some embodiments, the one or more additional peptide or polypeptide is fused at the C-terminus of the RRE. In some embodiments, a polynucleotide encoding the fusion protein comprises a nucleic acid sequence encoding the RRE, wherein the 5′ end of the nucleic acid sequence is linked to a nucleic acid sequence encoding the one or more additional peptide or polypeptide. In some embodiments, a polynucleotide encoding the fusion protein comprises a nucleic acid sequence encoding the RRE, wherein the 3′ end of the nucleic acid sequence is linked to a nucleic acid sequence encoding the one or more additional peptide or polypeptide. In some embodiments, the fusion protein comprises an amino acid linker between the RRE and the one or more additional peptide or polypeptide. In some embodiments, the fusion protein does not comprise an amino acid linker between RRE and the one or more additional peptide or polypeptide.

[0169] In some embodiments, the fusion protein comprised a RIPP recognition element (RRE) fused to one or more additional peptide or polypeptide. In some embodiments, the more additional peptide or polypeptide comprises a peptide or polypeptide encoded by a lasso peptide gene cluster. Examples of peptide or polypeptide that can be fused with a lasso precursor peptide or a lasso core peptide according to the present disclosure include but are not limited to (i) a lasso precursor peptide; (ii) a lasso core peptide; (iii) a lasso peptidase; (iv) a lasso cyclase, (v) a RRE; or (vi) any combinations of (i) to (vi). In specific embodiments, the fusion protein comprises at least one lasso precursor peptide fused to a RRE. In specific embodiments, the fusion protein comprises at least one lasso core peptide fused to a RRE. In specific embodiments, the fusion protein comprises at least one lasso cyclase fused to a RRE. In specific embodiments, the fusion protein comprises at least one lasso peptidase fused to a RRE.

[0170] In some embodiments, the fusion protein comprised a RIPP recognition element (RRE) fused to one or more additional peptide or polypeptide. In some embodiments, the one or more additional peptide or polypeptide comprises a peptide or polypeptide that facilitates production of the RRE through cell-free biosynthesis. Examples of peptide or polypeptide that can be fused with the RRE according to the present disclosure include but are not limited to (i) a peptide or polypeptide that increases the level of transcription of the RRE in the CFB system; (ii) a peptide or polypeptide that increases the level of translation of the RRE in the CFB system; (iii) a peptide or polypeptide that improves stability of the RRE; (vi) a peptide or polypeptide that improves solubility of the RRE; (v) a peptide or polypeptide that enables or facilitates the detection of the RRE; (vi) a peptide or polypeptide that enables or facilitates purification of the RRE; (vii) a peptide or polypeptide that enables or facilitates immobilization of the RRE; or (viii) any combination of (i) to (vii).

[0171] In some embodiments, the fusion protein comprised a RIPP recognition element (RRE) fused to one or more additional peptide or polypeptide. In some embodiments, the one or more additional peptide or polypeptide comprises a biologically active peptide or polypeptide. Examples of biologically active peptide or polypeptide that can be fused with a RRE according to the present disclosure include but are not limited to (i) a peptide or polypeptide capable of modulating the reaction catalyzing activity of the lasso peptidase or lasso cyclase; (ii) a peptide or polypeptide capable of modulating target specificity of the lasso peptidase or lasso cyclase; (iii) an enzyme having the same or different enzymatic activity as the lasso peptidase or lasso cyclase; or any combination of (i) to (iii).

[0172] In particular embodiments, the lasso precursor peptide genes are fused at the 5 ‘-terminus of the DNA template strand of the gene to oligonucleotide sequences that encode peptides or proteins, such as sequences encoding maltose-binding protein (MBP) or small ubiquitin-like modifier protein (SUMO), which enhance the stability, solubility, and production of the desired TX-TL products (Marblestone, J. G., et al., Protein Sci, 2006, 15, 182-189). In particular embodiments, the lasso precursor peptides are fused at the C-terminus of the leader sequences to form conjugates with peptides or proteins, such as maltose-binding protein or small ubiquitin-like modifier protein, which enhance the stability, solubility, and production of the fused MBP-lasso or SUMO-lasso precursor peptide.

[0173] In particular embodiments, the lasso precursor peptide genes or lasso core peptide genes are fused at the 3′-terminus of the DNA template strand of the gene to oligonucleotide sequences that encode peptides or proteins, such as sequences encoding maltose-binding protein (MBP) or small ubiquitin-like modifier protein (SUMO), which enhance the stability, solubility, and production of the desired TX-TL products. In particular embodiments, the lasso precursor peptides, lasso core peptides, or lasso peptides are fused at the N-terminus to form conjugates with peptides or proteins, such as maltose-binding protein or small ubiquitin-like modifier protein, which enhance the stability, solubility, and production of the fused MBP-lasso or SUMO-lasso precursor peptide.

[0174] In particular embodiments, the lasso precursor peptide genes or lasso core peptide genes are fused at the 5′-terminus of the DNA template strand of the gene to oligonucleotide sequences that encode a peptide or protein, with or without a linker, such as sequences encoding amino acid linkers connected to antibodies or antibody fragments, which provide bivalent lasso-antibody products that have enhanced activity against a single target cell or receptor or enhanced activity against two different target cells or receptors. In yet other embodiments, the lasso precursor peptides, lasso core peptides, or lasso peptides are fused at the C-terminus, with or without a linker, to form conjugates with peptides or proteins, such as amino acid linkers connected to antibodies or antibody fragments, which provide bivalent lasso-antibody products that have enhanced activity against a single target cell or receptor or enhanced activity against two different target cells or receptors.

[0175] In particular embodiments, the lasso precursor peptide genes or lasso core peptide genes are fused at the 5′-terminus of the DNA template strand of the gene to oligonucleotide sequences that encode peptides or proteins, with or without a linker, such as sequences encoding peptide tags for affinity purification or immobilization, including his-tags, a strep-tags, or FLAG-tags. In some embodiments, the lasso precursor peptides, lasso core peptides, or lasso peptides are fused at the C-terminus of the core peptides to form conjugates with other peptides or proteins, with or without a linker, such as peptide tags for affinity purification or immobilization, including his-tags, a strep-tags, or FLAG-tags.

[0176] In particular embodiments, lasso precursor peptides, lasso core peptides, or lasso peptides are fused to molecules that can enhance cell permeability or penetration into cells, for example through the use of arginine-rich cell-penetrating peptides such as TAT peptide, penetratin, and flock house virus (FHV) coat peptide (Brock, R, Bioconjug. Chem., 2014, 25, 863-868). In particular embodiments, a lasso precursor peptide gene or core peptide gene is fused at the 3′-terminus to oligonucleotide sequences that encode arginine-rich cell-penetrating peptides or proteins, including oligonucleotide sequences that encode penetratin, and flock house virus (FHV) coat peptide or similar peptides that contain guanidinium groups or a combination of lysine and guanidinium groups (Wender, P. A., et al., Adv. Drug Deliv. Rev., 2008, 60, 452-472). In particular embodiments, a lasso precursor peptide, lasso core peptide, or lasso peptide is fused at the C-terminus to peptides that promote cell penetration such as arginine-rich cell-penetrating peptides or proteins, including amino acid sequences that encode TAT peptide, penetratin, and flock house virus (FHV) coat peptide or similar peptides that contain guanidinium groups or a combination of lysine and guanidinium groups.

[0177] In particular embodiments, the lasso precursor peptide genes or lasso core peptide genes are fused at the 5′-terminus of the DNA template strand of the gene to oligonucleotide sequences that encode peptides or proteins, with or without a linker, such as sequences encoding peptide epitopes that are known to bind with high affinity to antibodies, cell surface proteins, or cell surface receptors, including cytokine binding epitopes, integrin ligand binding epitopes, and the like. In particular embodiments, the lasso precursor peptides, lasso core peptides, or lasso peptides are fused at the C-terminus to peptides or proteins, with or without a linker, such as peptide epitopes that are known to bind with high affinity to antibodies, cell surface proteins, or cell surface receptors, including cytokine binding epitopes, integrin ligand binding epitopes, and the like.

[0178] In particular embodiments, the cell-free biosynthesis reactions are conducted with a minimal set of lasso peptide biosynthesis components combined and contacted with genes that encode additional proteins or enzymes, including genes that encode RIPP recognition elements (RREs). In other embodiments, cell-free biosynthesis reactions are conducted with a minimal set of lasso peptide biosynthesis components combined with additional isolated proteins or enzymes, including RREs.

[0179] In particular embodiments, cell-free biosynthesis reactions are conducted with a minimal set of lasso peptide biosynthesis components combined and contacted with genes that encode additional proteins or enzymes, including genes that encode lasso peptide modifying enzymes such as N-methyltransferases, O-methyltransferases, biotin ligases, glycosyltransferases, esterases, acylases, acyltransferases, aminotransferases, amidases, hydroxylases, dehydrogenases, halogenases, kinases, RiPP heterocyclases, RiPP cyclodehydratases, and prenyltransfemses.

[0180] In particular embodiments, cell-free biosynthesis reactions are conducted with a minimal set of lasso peptide biosynthesis components combined and contacted with additional isolated proteins or enzymes, including lasso peptide modifying enzymes such as N-methyltransferases, O-methyltransferases, biotin ligases, glycosyltransferases, esterases, acylases, acyltransferases, aminotransferases, amidases, hydroxylases, dehydrogenases, halogenases, kinases, RiPP heterocyclases, RiPP cyclodehydratases, and prenyltransfemses.

[0181] In particular embodiments, cell-free biosynthesis methods described herein are used to produce lasso peptides and lasso peptide analogs by combining and contacting a minimal set of lasso peptide biosynthesis components, including, for example: (1) isolated precursor peptides or precursor peptide fusions, combined together and contacted with isolated proteins that include a lasso peptidase and a lasso cyclase, or fusions thereof, (2) oligonucleotides (linear or circular constructs of DNA or RNA) that encode for precursor peptides or precursor peptide fusions, combined together and contacted with isolated proteins that include a lasso peptidase and a lasso cyclase, or fusions thereof, (3) isolated precursor peptides or precursor peptide fusions, combined together and contacted with oligonucleotides that encode for a lasso peptidase and a lasso cyclase, or fusions thereof, (4) oligonucleotides that encode for lasso precursor peptides, a lasso peptidase, and a lasso cyclase, or fusions thereof, combined together and contacted, (5) isolated core lasso peptides combined and contacted with isolated lasso cyclases, or fusions thereof, (6) oligonucleotides that encode for core lasso peptides combined and contacted with isolated lasso cyclases, or fusions thereof, or (7) oligonucleotides that encode for core lasso peptides combined and contacted with oligonucleotides that encode for lasso cyclases, or fusions thereof, in a cell-free reaction mixture.

[0182] In particular embodiments, cell-free biosynthesis of lasso peptides is conducted with isolated peptide and enzyme components in standard buffered media, such as phosphate-buffered saline or tris-buffered saline, in each case containing salts, ATP, and co-factors facilitating enzyme activity. In some embodiments, cell-free biosynthesis of lasso peptides is conducted in a CFB reaction mixture using genes that require transcription (TX) and translation (TL) to afford the lasso precursor peptide and/or lasso peptide biosynthetic enzymes in situ, and such cell-free biosynthesis processes are conducted in cell extracts derived from prokaryotic or eukaryotic cells (Gagoski, D., et al., Biotechnol. Bioeng. 2016; 113: 292-300; Culler, S. et al., PCT Appl. No. WO2017/031399).

[0183] In some embodiments, lasso precursor peptides, lasso core peptides, lasso peptides, lasso peptide analogs, lasso peptidases, and/or lasso cyclases are fused to other peptides or proteins, with or without linkers between the partners, to enhance expression, to enhance solubility, to enhance cell permeability or penetration, to provide stability, to facilitate isolation and purification, and/or to add a distinct functionality. A variety of protein scaffolds may be used as fusion partners for lasso peptides, lasso peptide analogs, lasso core peptides, lasso precursor peptides, lasso peptidases, and/or lasso cyclases, including but not limited to maltose-binding protein (MBP), glutathione S-transferase (GST), thioredoxin (TRX), Nus A protein, ubiquitin (UB), and the small ubiquitin-like modifier protein SUMO (De Marco, V., et al., Biochem. Biophys. Res. Commun., 2004, 322, 766-771; Wang, C., et al., Biochem. J., 1999, 338, 77-81). In other embodiments, peptide fusion partners are used for rapid isolation and purification of lasso precursor peptides, lasso core peptides, lasso peptides, lasso peptide analogs, lasso peptidases, and/or lasso cyclases, including His6-tags, strep-tags, and FLAG-tags (Pryor, K. D., Leiting, B., Protein Expr. Purif., 1997, 10, 309-319; Einhauer A. Jungbauer A., J. Biochem. Biophys. Methods, 2001, 49, 455-465; Schmidt, T. G., Skerra, A., Nature Protocols, 2007, 2, 1528-1535). In other embodiments, lasso peptides, lasso core peptides, or lasso precursor peptides are fused to molecules that can enhance cell permeability or pentration into cells, for example through the use of arginine-rich cell-penetrating peptides such as TAT peptide, penetratin, and flock house virus (FHV) coat peptide (Brock, R, Bioconjug. Chem., 2014, 25, 863-868; Herce, H. D., et al., J. Am. Chem. Soc., 2014, 136, 17459-17467; Ter-Avetisyan, G. et al., J. Biol. Chem., 2009, 284, 3370-3378; Schmidt, N., et al., FEBS Lett., 2010, 584, 1806-1813; Tunnemann, G. et al., FASEB J., 2006, 20, 1775-1784; Lattig-Tunnemann, G. et al., Nat. Commun., 2011, 2, 453, DOI: 10.1038/ncomms1459; Reissmann, S., J Pept Sci., 2014, 20, 760-784).

[0184] In other embodiments, peptide or protein fusion partners are used to introduce new functionality into lasso core peptides, lasso peptides or lasso peptide analogs, such as the ability to bind to a separate biological target, e.g., to form a bispecific molecule for multitarget engagement. In such cases, a variety of peptide or protein partners may be fused with lasso core peptides, lasso peptides or lasso peptide analogs, with or without linkers between the partners, including but not limited to peptide binding epitopes, cytokines, antibodies, monoclonal antibodies, single domain antibodies, antibody fragments, nanobodies, monobodies, affibodies, nanofitins, fluorescent proteins (e.g., GFP), avimers, fibronectins, designed ankyrins, lipocallans, cyclotides, conotoxins, or a second lasso peptide with the same or different binding specificity, e.g., to form bivalent or bispecific lasso peptides (Huet, S., et al., PLoS One, 2015, 10 (11): e0142304., doi:10.1371/journal.pone.0142304; Steeland, S., et al., Drug Discov. Today, 2016, 21, 1076-1113; Lipovsek, D., Prot. Eng., Des. Sel., 2011, 24, 3-9; Sha, F., et al., Prot. Sci., 2017, 26, 910-924; Silverman, J., et al., Nat. Biotech., 2005, 23, 1556-1561; Pluckthun, A., Diagnostics, and Therapy, Annu. Rev. Pharmacol. Toxicol., 2015, 55, 489-511; Nelson, A. L., mAbs, 2010, 2, 77-83; Boldicke, T., Prot. Sci, 2017, 26, 925-945; Liu, Y., et al., ACS Chem Biol., 2016, 11, 2991-2995; Liu, T., et al., Proc. Nat. Acad. Sci. USA., 2015, 112, 1356-1361; Müller D., Pharmacol Ther., 2015, 154, 57-66; Weidmann, J.; Craik, D. J., J. Experimental Bot., 2016, 67, 4801-4812; Burman, R., et al., J. Nat. Prod. 2014, 77, 724-736; Reinwarth, M., et al., Molecules, 2012, 17, 12533-12552; Uray, K., Hudecz, F., Amino Acids, Pept. Prot., 2014, 39, 68-113).

[0185] In other embodiments, a lasso precursor peptide gene is fused at the 3′-terminus of the leader sequence, or at the 5′-terminus of the core peptide sequence of the DNA template strand of the gene, to oligonucleotide sequences that encode peptides or proteins, including sequences that encode maltose-binding protein (MBP) or small ubiquitin-like modifier protein (SUMO), which enhance the stability and/or production of the desired products formed using a TX-TL-based CFB method or process (Marblestone, J. G., et al., Protein Sci, 2006, 15, 182-189). In some embodiments, the lasso precursor peptides are fused at the N-terminus of the leader sequence or at the C-terminus of the core sequence to form conjugates with peptides or proteins, including maltose-binding protein or small ubiquitin-like modifier protein, which enhance the stability and/or production of the lasso peptide precursor fusion product, e.g., MBP-lasso precursor peptide or SUMO-lasso precursor peptide. In yet other embodiments, a lasso core peptide gene is fused at at the 5′-terminus of the core peptide sequence of the DNA template strand of the gene to oligonucleotide sequences that encode peptides or proteins, including sequences that encode maltose-binding protein (MBP) or small ubiquitin-like modifier protein (SUMO), which enhance the stability and/or production of the desired products formed using a TX-TL-based CFB method or process. In alternative embodiments, a lasso core peptide is fused at the C-terminus of the core sequence to form conjugates with peptides or proteins, including maltose-binding protein or small ubiquitin-like modifier protein, which enhance the stability and/or production of the lasso peptide precursor fusion product, e.g., MBP-lasso core peptide or SUMO-lasso core peptide. In alternative embodiments, a lasso peptide is fused at the N-terminus or at the C-terminus of the lasso peptide to form conjugates with peptides or proteins, including maltose-binding protein or small ubiquitin-like modifier protein, which enhance the stability and/or production of the lasso peptide precursor fusion product, e.g., MBP-lasso peptide or SUMO-lasso peptide.

[0186] In other embodiments, lasso peptidase or lasso cyclase genes are fused at the 5′- or 3′-terminus with oligonucleotide sequences that encode peptides or proteins, including sequences that encode maltose-binding protein (MBP) or small ubiquitin-like modifier protein (SUMO). In alternative embodiments, lasso peptidases or lasso cyclases are fused at the N-terminus or the C-terminus to peptides or proteins, such as maltose-binding protein (MBP) or small ubiquitin-like modifier protein (SUMO), which enhance the stability and/or production of the desired TX-TL products.

[0187] In other embodiments, a lasso precursor peptide gene or core peptide gene is fused at the 5′-terminus of the DNA template strand of the gene to oligonucleotide sequences that encode arginine-rich cell-penetrating peptides or proteins, including oligonucleotide sequences that encode penetratin, and flock house virus (FHV) coat peptide or similar peptides that contain guanidinium groups or a combination of lysine and guanidinium groups (Wender, P. A., et al., Adv. Drug Deliv. Rev., 2008, 60, 452-472). In other embodiments, a lasso precursor peptide, lasso core peptide, or lasso peptide is fused at the C-terminus to peptides that promote cell penetration such as arginine-rich cell-penetrating peptides or proteins, including amino acid sequences that encode TAT peptide, penetratin, and flock house virus (FHV) coat peptide or similar peptides that contain guanidinium groups or a combination of lysine and guanidinium groups.

[0188] In alternative embodiments, the lasso precursor peptide genes or lasso core peptide genes are fused at the 5′-terminus of the DNA template strand of the gene to oligonucleotide sequences that encode a peptide or protein, with or without a linker, such as sequences encoding amino acid linkers connected to antibodies or antibody fragments, which provide bivalent lasso-antibody products that exhibit enhanced activity against an individual biological target, receptor, or cell type, or enhanced activity against two different biological targets, receptors, or cell types. In some embodiments, the lasso precursor peptides or lasso core peptides or lasso peptides are fused at the C-terminus to form conjugates with peptides or proteins, such as amino acid linkers connected to antibodies or antibody fragments, which provide bivalent lasso-antibody products that exhibit enhanced activity against an individual biological target, receptor, or cell type, or enhanced activity against two different biological targets, receptors, or cell types.

[0189] In alternative embodiments, the lasso precursor peptide genes or lasso core peptide genes are fused at the 5′-terminus of the DNA template strand of the gene to oligonucleotide sequences that encode a peptide or protein, with or without a linker, such as sequences encoding peptide tags for affinity purification or immobilization, including His-tags, strep-tags, or FLAG-tags. In some embodiments, the lasso precursor peptides or lasso core peptides or lasso peptides are fused at the C-terminus to form conjugates with peptides or proteins, such as, such as sequences that encode peptide tags for affinity purification or immobilization, including His-tags, strep-tags, or FLAG-tags.

[0190] In some embodiments, the lasso precursor peptide genes or lasso core peptide genes are fused at the 5′-terminus of the DNA template strand of the gene to oligonucleotide sequences that encode peptides or proteins, with or without a linker, such as sequences encoding peptide epitopes that are known to bind with high affinity to antibodies, cell surface proteins, or cell surface receptors, including cytokine binding epitopes, integrin ligand binding epitopes, and the like. In some embodiments, the lasso precursor peptides, lasso core peptides, or lasso peptides are fused at the C-terminus to peptides or proteins, with or without a linker, such as peptide epitopes that are known to bind with high affinity to antibodies, cell surface proteins, or cell surface receptors, including cytokine binding epitopes, integrin ligand binding epitopes, and the like.

[0191] In other embodiments, cell-free biosynthesis reactions are conducted with a minimal set of lasso peptide biosynthesis components combined with genes that encode additional peptides, proteins or enzymes, including genes that encode RIPP recognition elements (RREs) or oligonucleotides that encode RREs that are fused to the 5′ or 3′ end of a lasso precursor peptide gene, a lasso core peptide gene, a lasso peptidase gene or a lasso cyclase gene. In other embodiments, cell-free biosynthesis reactions are conducted with a minimal set of lasso peptide biosynthesis components, including lasso precursor peptides, lasso peptidases, or lasso cyclase that are fused to RREs at the N-terminus or C-terminus. In other embodiments, cell-free biosynthesis reactions are conducted with a minimal set of lasso peptide biosynthesis components combined and contacted with additional isolated proteins or enzymes, including (RREs).

[0192] In some embodiments, cell-free biosynthesis reactions are conducted with a minimal set of lasso peptide biosynthesis components combined with genes that encode additional proteins or enzymes, including genes that encode lasso peptide modifying enzymes such as N-methyltransferases, O-methyltonsferases, biotin ligases, glycosyltransferases, esterases, acylases, acyltransferases, aminotransferases, amidases, halogenases, kinases, RiPP heterocyclases, RiPP cyclodehydratases, and prenyltransferases.

[0193] In some embodiments, cell-free biosynthesis reactions are conducted with a minimal set of lasso peptide biosynthesis components combined and contacted with additional isolated proteins or enzymes, including lasso peptide modifying enzymes such as N-methyltransferases, O-methyltransferases, biotin ligases, glycosyltransferases, esterases, acylases, acyltransferases, aminotransferases, amidases, halogenases, kinases, RiPP heterocyclases, RiPP cyclodehydratases, and prenyltransferases.

[0194] In some embodiments, cell-free biosynthesis of lasso peptides is conducted with isolated peptide and enzyme components in standard buffered media, such as phosphate-buffered saline or tris-buffered saline, in each case containing salts, ATP, and co-factors for lasso peptidase and lasso cyclase enzymatic activity. In some embodiments, cell-free biosynthesis of lasso peptides is conducted using genes that require transcription (TX) and translation (TL) to afford the lasso precursor peptide and/or lasso peptide biosynthetic enzymes in situ, and such in vitro biosynthesis processes are conducted in cell extracts derived from prokaryotic or eukaryotic cells (Gagoski, D., et al., Biotechnol. Bioeng. 2016; 113: 292-300; Culler, S. et al., PCT Appl. No. W2017/031399).

[0195] Particularly, in some embodiments, the CFB system further comprises co-factors for one or more enzymes to perform the enzymatic function. In some embodiments, the CFB system comprises co-factors of the lasso peptidase. In some embodiments, the CFB system comprises co-factors of the lasso cyclase. In some embodiments, the CFB system further comprises ATP. In some embodiments, the CFB system further comprises salts. In some embodiments, the CFB system components are contained in a buffer media. In some embodiments, the CFB system components are contained in phosphate-buffered saline solution. In some embodiments, the CFB system components are contained in a tris-buffered saline solution.

[0196] In some embodiments, the CFB system comprises the biosynthetic and metabolic machinery of a cell, without using a living cell. In some embodiments, the CFB system comprises a CFB reaction mixture as provided herein. In some embodiments, the CFB system comprises a cell extract as provided. In some embodiments, the cell extract is derived from prokaryotic cells. In some embodiments, the cell extract is derived from eukaryotic cells. In some embodiments, the CFB system comprises a supplemented cell extract provided herein. In some embodiments, the CFB system comprises in vitro transcription and translation machinery as provided herein.

[0197] In some embodiments, the CFB system comprises cell extract from one type of cell. In some embodiments, the CFB system comprises cell extracts from two or more types of cells. In some embodiments, the CFB system comprises cell extracts of 2, 3, 4, 5 or more than 5 types of cells. In some embodiments, the different types of cells are from the same species. In other embodiments, the different types of cells are from different species. In particular embodiments, the CFB system comprises cell extract from one or more types of cell, species, or class of organism, such as E. coli and/or Saccharomyces cerevisiae, and/or Streptomyces lividans. In some embodiments, the CFB system comprises cell extracts from yeast. In some embodiments, the CFB system comprises cell extracts from both E. coli and yeast.

[0198] Cell extract from cells that natively produce a lasso peptide can offer a robust transcription/translation machinery, and/or cellular context that facilitates proper protein folding or activity, or supply precursors for the lasso peptide pathway. Accordingly, in some embodiments, the CFB system comprises cell extract from a chassis organism cells, mixed with one or a combination of two or more cell extracts derived from different species. In particular embodiments, the CFB system comprises cell extract from E. coli cells, mixed with cell extracts from one or more organism that natively produces lasso peptide. In particular embodiments, the CFB system comprises cell extract from E. coli cells, mixed with cell extracts from one or more organism that relates to an organism that natively produces lasso peptide. In alternative embodiments, CFB system comprises cell extract from a chassis organism cells supplemented with one or more purified or isolated factors known to facilitate lasso peptide production from an organism that natively produces a lasso peptide.

[0199] In some embodiments, the CFB systems including in vitro transcription/translation (TX-TL) systems, provided herein to produce lasso peptides and lasso peptide analogs comprises whole cell, cytoplasmic or nuclear extract from a single organism. In some embodiments, the CFB systems comprise whole cell, cytoplasmic or nuclear extract from E. coli. In some embodiments, the CFB systems comprise whole cell, cytoplasmic or nuclear extract from Saccharomyces cerevisiae (S. cerevisiae). In some embodiments, the CFB systems comprise whole cell, cytoplasmic or nuclear extract from an organism of the Actinomyces genus, e.g., a Streptomyces. In some embodiments, the CFB systems including in vitro transcription/translation (TX-TL) systems, provided herein to produce lasso peptides and lasso peptide analogs comprises mixtures of whole cell, cytoplasmic, and/or nuclear extracts from the same or different organisms, such as one or more species selected from E. coli, S. cerevisiae, or the Actinomyces genus.

[0200] In some embodiments, strain engineering approaches as well as modification of the growth conditions are used (on the organism from which an at least one extract is derived) towards the creation of cell extracts as provided herein, to generate mixed cell extracts with varying proteomic and metabolic capabilities in the final CFB reaction mixture. In alternative embodiments, both approaches are used to tailor or design a final CFB reaction mixture for the purpose of synthesizing and characterizing lasso peptides, or for the creation of lasso peptide analogs through combinatorial biosynthesis approaches.

[0201] In some embodiments, the CFB system provided herein comprises whole cell, cytoplasmic or nuclear extracts from a bacterial cell or eukaryotic cell, including insect, plant, fungal, yeast, or mammalian cells. In alternative embodiments, the CFB system provided herein comprises whole cell, cytoplasmic or nuclear extracts from a bacterial cell or eukaryotic cell, including insect, plant, fungal, yeast, or mammalian cells, and are designed, produced and processed in away to maximize efficacy and yield in the production of desired lasso peptides or lasso peptide analogs.

[0202] In some embodiment, the CFB system comprises cell extract from at least two different bacterial cells. In some embodiment, the CFB system comprises cell extract from at least two different fungal cells. In some embodiment, the CFB system comprises cell extract from at least two different yeast cells. In some embodiment, the CFB system comprises cell extract from at least two different insect cells. In some embodiment, the CFB system comprises cell extract from at least two different plant cells. In some embodiment, the CFB system comprises cell extract from at least two different mammalian cells. In some embodiment, the CFB system comprises cell extract from at least two different species selected from bacteria, fungus, yeast, insect, plant, and mammal. In particular embodiments, the CFB system comprises cell extract derived from an Escherichia or a Escherichia coli (E. coli). In particular embodiments, the CFB system comprises cell extract derived from a Streptomyces or an Actinobacteria. In particular embodiments, the CFB system comprises cell extract derived from an Ascomycota, Basidiomycota or a Saccharomycetales. In particular embodiments, the CFB system comprises cell extract derived from a Penicillium or a Trichocomaceae. In particular embodiments, the CFB system comprises cell extract derived from a Spodoptera, a Spodoptera frugiperda, a Trichoplusia or a Trichoplusia ni. In particular embodiments, the CFB system comprises cell extract derived from a Poaceae, a Triticum, or a wheat germ. In particular embodiments, the CFB system comprises cell extract derived from a rabbit reticulocyte. In particular embodiments, the CFB system comprises cell extract derived from a HeLa cell.

[0203] In alternative embodiments, the CFB system comprises cell extract derived from any prokaryotic and eukaryotic organism including, but not limited to, bacteria, including Archaea, eubacteria, and eukaryotes, including yeast, plant, insect, animal, and mammal, including human cells. In alternative embodiments, at least one of the cell extracts used in the CFB system provided herein comprises an extract derived from: Escherichia coli, Saccharomyces cerevisiae, Saccharomyces kluyveri, Candida boidinii, Clostridium kluyveri, Clostridium acetobutylicum, Clostridium beyerinckii, Clostridium saccharoperbutylacetonicum, Clostridium pefringens, Clostridium dificile, Clostridium botulinum, Clostridium tyrobutyricum, Clostridium tetanomorphum, Clostridium tetani, Clostridium propionicum, Clostridium aminobutyricum, Clostridium subterminale, Clostridium sticklandn, Ralstonia eutropha, Mycobacterium bovis, Mycobacterium tuberculosis, Porphyromonas gingivalis, Arabidopsis thaliana, Thermus thermophilus, Pseudomonas species, including Pseudomonas aeruginosa, Pseudomonas putida, Pseudomonas stutzeri, Pseudomonas fluorescens, Homo sapiens, Oryctolagus cuniculus, Rhodobacter spaeroides, Thermo-anaerobacter brockii, Metallosphaera sedula, Leuconostoc mesenteroides, Chlorofexus aurantiacus, Roseiexus castenholzii, Erythrobacter, Simmondsia chinensis, Acinetobacter species, including Acinetobacter calcoaceticus and Acinetobacter baylyi, Porphyromonas gingivalis, Sulfolobus tokodai, Sulfolobus solfataricus, Sulfolobus acidocaldarius, Bacillus subtilis, Bacillus cereus, Bacillus megaterium, Bacillus brevis, Bacillus pumilus, Rattus norvegicus, Klebsiella pneumonia, Klebsiella oxytoca, Euglena gracilis, Treponema denticola, Moorella thermoacetica, Thermotoga maritima, Halobacterium salinarum, Geobacillus stearothermophilus, Aeropyrum pernix, Sus scrofa, Caenorhabditis elegans, Corynebacterium glutamicum, Acidaminococcus fermentans, Lactococcus lactis, Lactobacillus plantarum, Streptococcus thermophilus, Enterobacter aerogenes, Candida, Aspergillus terreus, Pedicoccus pentosaceus, Zymomonas mobilus, Acetobacter pasteurians, Kluyveromyces lactis, Eubacterium barkeri, Bacteroides capillosus, Anaerotruncus colihominis, Natranaerobius thermophilusm, Campylobacter jejuni, Haemophilus influenzae, Serratia marcescens, Citrobacter amalonaticus, Myxococcus xanthus, Fusobacterium nuleatum, Penicillium chrysogenum, marine gamma proteobacterium, butyrate-producing bacterium, Nocardia iowensis, Nocardia farcinica, Streptomyces griseus, Schizosaccharomyces pombe, Geobacillus thermoglucosidasius, Salmonella typhimurium, Vibrio cholera, Heliobacter pylori, Nicotiana tabacum, Oryza sativa, Haloferax mediterranei, Agrobacterium tumefaciens, Achromobacter denitrificans, Fusobacterium nucleatum, Streptomyces clavuligenus, Acinetobacter baumanii, Mus musculus, Lachancea kluyveri, Trichomonas vaginalis, Trypanosoma brucei, Pseudomonas stutzeri, Bradyrhizobium japonicum, Mesorhizobium loti, Bos taurus, Nicotiana glutinosa, Vibrio vulnificus, Selenomonas ruminantium, Vibrio parahaemolyticus, Archaeoglobus fulgidus, Haloarcula marismortui, Pyrobaculum aerophilum, Mycobacterium smegmatis MC2155, Mycobacterium avium subsp. paratuberculosis K-10, Mycobacterium marinum M, Tsukamurella paurometabola DSM20162, Cyanobium PCC7001, Dictyostelium discoideum AX4.

[0204] In alternative embodiments, at least one cell, cytoplasmic or nuclear extract used in the CFB system provided herein comprises a cell extract from or comprises an extract derived from: Acinetobacter baumannii Naval-82, Acinetobacter sp. ADPI, Acinetobacter sp. strain M-1, Actinobacillus succinogenes 130Z, Allochromatium vinosum DSM180, Amycolatopsis methanolica, Arabidopsis thaliana, Atopobium parvulum DSM20469, Azotobacter vinelandii DJ, Bacillus alcalophilus ATCC 27647, Bacillus azotoformans IMG 9581, Bacillus coagulans 36D1, Bacillus megaterium, Bacillus methanolicus MGA3, Bacillus methanolicus PB1, Bacillus methanolicus PB-1, Bacillus selenitireducens MLS10, Bacillus smithii, Bacillus subtilis, Burkholderia cenocepacia, Burkholderia cepacia, Burkholderia multivorans, Burkholderia pyrrocinia, Burkholderia stabilis, Burkholderia thailandensis E264, Burkholderiales bacterium Joshi_001, Butyrate-producing bacterium L2-50, Campylobacter jejuni, Candida albicans, Candida boidinii, Candida methylica, Carboxydothermus hydrogenoformans, Carboxydothermus hydrogenoformans Z-2901, Caulobacter sp. AP07, Chloroflexus aggregans DM 9485, Chlorofexus aurantiacus J-10-fl, Citrobacter freundii, Citrobacter koseri ATCC BAA-895, Citrobacter youngae, Clostridium, Clostridium acetobutylicum, Clostridium acetobutylicum ATCC 824, Clostridium acidurici, Clostridium aminobutyricum, Clostridium asparagiforme DSM15981, Clostridium beijerinckii, Clostridium beijerinckii NCIMB 8052, Clostridium bolteae ATCC BAA-613, Clostridium carboxidivorans P7, Clostridium cellulovorans 743B, Clostridium difficile, Clostridium hiranonis DSM13275, Clostridium hylemonae DSM15053, Clostridium kluyveri, Clostridium kluyveri DSM555, Clostridium jungdahli, Clostridium ljungdahlii DSM13528, Clostridium methylpentosum DSM5476, Clostridium pasteurianum, Clostridium pasteurianum DSM525, Clostridium perfringens, Clostridium perfringens ATCC 13124, Clostridium perfringens str. 13, Clostridium phytofermentans ISDg, Clostridium saccharobutylicum, Clostridium saccharoperbutylacetonicum, Clostridium saccharoperbutylacetonicum N1-4, Clostridium tetani, Corynebacterium glutamicum ATCC 14067, Corynebacterium glutamicum R, Corynebacterium sp. U-96, Corynebacterium variabile, Cupriavidus necator N-1, Cyanobium PCC7001, Desulfatibacillum alkenivorans AK-01, Desuftobacterium hafniense, Desulfotobacterium metallireducens DSM15288, Desulfotomaculum reducens M-1, Desulfovibrio africanus str. Walvis Bay, Desulfovibrio fructosovorans JJ, Desulfovibrio vulgaris str. Hildenborough, Desulfovibrio vulgaris sr. Miazaki F, Dictyostelium discoideum AX4, Escherichia coli, Escherichia coli K-12, Escherichia coli K-12MG1655, Eubacterium hallii DSM3353, Flavobacterium frigoris, Fusobacterium nucleatum subsp. polymorphum ATCC 10953, Geobacillus sp. Y4.1MC1, Geobacillus themodenitrifcans NG80-2, Geobacter bemidjiensis Bem, Geobacter sulfurreducens, Geobacter sulfurreducens PCA, Geobacillus stearothermophilus DSM2334, Haemophilus influenzae, Helicobacter pylori, Homo sapiens, Hydrogenobacter thermophilus, Hydrogenobacter thermophilus TK-6, Hyphomicrobium denitrificans ATCC 51888, Hyphomicrobium zavarzinii, Klebsiella pneumoniae, Klebsiella pneumoniae subsp. pneumoniae MGH 78578, Lactobacillus brevis ATCC 367, Leuconostoc mesenteroides, Lysinibacillus fusiformis, Lysinibacillus sphaericus, Mesorhizobium loti MAFF303099, Metallosphaera sedula, Methanosarcina acetivorans, Methanosarcina acetivorans C2A, Methanosarcina barkeri, Methanosarcina mazei Tuc01, Methylobacter marinus, Methylobacterium extorquens, Methylobacterium extorquens AM1, Methylococcus capsulatas, Methylomonas aminofaciens, Moorella thermoacetica, Mycobacter sp. strain JCI DSM3803, Mycobacterium avium subsp. paratuberculosis K-10, Mycobacterium bovis BCG, Mycobacterium gastri, Mycobacterium marinum M, Mycobacterium smegmatis, Mycobacterium smegmatis MC2155, Mycobacterium tuberculosis, Nitrosopumilus salaria BD31, Nirososphaera gargensis Ga9.2, Nocardia farcinica IFM10152, Nocardia iowensis (sp. NRRL 5646), Nostoc sp. PCC 7120, Ogataea angusta, Ogataea parapolymorpha DL-1 (Hansenula polymorpha DL-1), Paenibacillus peoriae KCTC 3763, Paracoccus denitrifcans, Penicillium chrysogenum, Photobacterium profundum 3TCK, Phytofermentans ISDg Pichia pastoris, Picrophilus torridus DSM9790, Porphyromonas gingivalis, Porphyromonas gingivalis W83, Pseudomonas aeruginosa PA01, Pseudomonas denitrifcans, Pseudomonas knackmussii, Pseudomonas putida, Pseudomonas sp, Pseudomonas syringae pv. syringae B728a, Pyrobaculum islandicum DSM4184, Pyrococcus abyssi, Pyrococcus furiosus, Pyrococcus horikoshii OT3, Ralstonia eutropha, Ralstonia eutropha H16, Rhodobacter capsulatus, Rhodobacter sphaeroides, Rhodobacter sphaeroides ATCC 17025, Rhodopseudomonas palustris, Rhodopseudomonas palustris CGA009, Rhodopseudomonas palustris DX-1, Rhodospirillum rubrum, Rhodospirillum rubrum ATCC 11170, Ruminococcus obeum ATCC 29174, Saccharomyces cerevisiae, Saccharomyces cerevisiae S288c, Salmonella enterica, Salmonella enterica subsp. enterica serovar Typhimurium str. LT2, Salmonella enterica typhimurium, Salmonella typhimurium, Schizosaccharomyces pombe, Sebaldella termitidis ATCC 33386, Shewanella oneidensis MR-1, Sinorhizobium meliloti 1021, Streptomyces coelicolor, Streptomyces griseus subsp. griseus NBRC 13350, Sulfolobus acidocalarius, Sulfolobus solfataricus P-2, Synechocystis str. PCC 6803, Syntrophobacter fumaroxdans, Thauera aromatica, Thermoanaerobacter sp. X514, Thermococcus kodakaraensis, Thermococcus litoralis, Thermoplasma acidophilum, Thermoproteus neutrophilus, Thermotoga maritima, Thiocapsa roseopersicina, Tolumonas auensis DSM9187, Trichomonas vaginalis G3, Trypanosoma brucei, Tsukamurella paurometabola DSM 20162, Vibrio cholera, Vibrio harveyi ATCC BAA-1116, Xanthobacter autotrophicus Py2, Yersinia intermedia, or Zea mays.

[0205] In alternative embodiments, CFB system provided herein comprises cell extract supplemented with additional ingredients, compositions, compounds, reagents, ions, trace metals, salts, elements, buffers and/or solutions. In alternative embodiments, the CFB system provided herein uses or fabricates environmental conditions to optimize the rate of formation or yield of a lasso peptide or lasso peptide analog.

[0206] In alternative embodiments, CFB system provided herein comprises a reaction mixture or cell extracts that are supplemented with a carbon source and other nutrients. In some embodiments, the CFB system can comprise any carbohydrate source, including but not limited to sugars or other carbohydrate substances such as glucose, xylose, maltose, arabinose, galactose, mannose, maltodextin, fuctose, sucrose and/or starch.

[0207] In alternative embodiments, CFB system provided herein comprises cell extract supplemented with all twenty proteinogenic naturally occurring amino acids and corresponding transfer ribionucleic acids (tRNAs). In alternative embodiments, CFB system provided herein comprises cell extract supplemented with adenosine triphosphate (ATP), and/or adenosine diphosphate (ADP). In alternative embodiments, CFB system provided herein comprises cell extract supplemented with glucose, xylose, maltose, arabinose, galactose, mannose, maltodextrin, fructose, sucrose and/or starch. In alternative embodiments, CFB system provided herein comprises cell extract supplemented with purine and guanidine nucleotides, adenosine triphosphate, guanosine triphosphate, cytosine triphosphate, and uridine triphosphate. In alternative embodiments, CFB system provided herein comprises cell extract supplemented with cyclic-adenosine monophosphate (cAMP) and/or 3-phosphoglyceric acid (3-PGA). In alternative embodiments, CFB system provided herein comprises cell extract supplemented with nicotimamide adenine dinucleotides NADH and/or NAD, or nicotimamide adenine dinucleotide phosphates, NADPH, and/or NADP, or combinations thereof. In alternative embodiments, CFB system provided herein comprises cell extract supplemented with amino acid salts such as magnesium glutamate and/or potassium glutamate. In alternative embodiments, CFB system provided herein comprises cell extract supplemented with buffering agents such as HEPES, TRIS, spermidine, or phosphate salts. In alternative embodiments, CFB system provided herein comprises cell extract supplemented with salts, including but not limited to, potassium phosphate, sodium chloride, magnesium phosphate, and magnesium sulfate. In alternative embodiments, CFB system provided herein comprises cell extract supplemented with folinic acid and co-enzyme A (CoA). In alternative embodiments, CFB system provided herein comprises cell extract supplemented with crowding agents such as PEG 8000, Ficoll 70, or Ficoll 400, or combinations thereof. For a general description of cell-free extract production and preparation, see: Krinsky, N., et al., PLoS ONE, 2016, 11(10): e0165137.

[0208] In alternative embodiments, the CFB system is maintained under aerobic or substantially aerobic conditions. In some embodiments, the aerobic or substantially aerobic conditions can be achieved, for example, by sparging with air or oxygen, shaking under an atmosphere of air or oxygen, stirring under an atmosphere of air or oxygen, or combinations thereof. In alternative embodiments, the CFB system is maintained is maintained under anaerobic or substantially anaerobic conditions. In some embodiments, the anaerobic or substantially anaerobic conditions can be achieved, for example, by first sparging the medium with nitrogen and then sealing the wells or reaction containers, or by shaking or stirring under a nitrogen atmosphere. Briefly, anaerobic conditions refer to an environment devoid of oxygen. In some embodiments, substantially anaerobic conditions include, for example, CFM processes conducted such that the dissolved oxygen concentration in the medium remains between 0 and 10% of saturation. In some embodiments, substantially anaerobic conditions also include performing the CFB methods and processes inside a sealed chamber maintained with an atmosphere of less than 1% oxygen. The percent of oxygen can be maintained by, for example, sparging the CFB reaction with an N₂/CO₂ mixture or other suitable non-oxygen gas or gases.

[0209] In some embodiments, the CFB system is maintained at a desirable pH for high rates and yields in the production of lasso peptides and lasso peptide analogs. In some embodiments, the CFB system is maintained at neutral pH. In some embodiments, the CFB system is maintained at a pH of around 7 by addition of a buffer. In some embodiments, the CFB system is maintained at a pH of around 7 by addition of base, such as NaOH. In some embodiments, the CFB system is maintained at a pH of around 7 by addition of an acid.

[0210] In alternative embodiments, the CFB system comprises cell extract supplemented with one or more enzymes of the central metabolism pathways of a microorganism. In alternative embodiments, the CFB system comprises cell extract supplemented with one or more nucleic acids that encode one or more enzymes of the central metabolism pathway of a microorganism. In some embodiments, the central metabolism pathway enzyme is selected from enzymes of the tricarboxylic acid cycle (TCA, or Krebs cycle), the glycolysis pathway or the Citric Acid Cycle, or enzymes that promote the production of amino acids.

[0211] In some embodiments, the preparation CFB reaction mixtures and cell extracts employed for the CFB system as provided herein comprises characterization of the CFB reaction mixtures and cell extracts using proteomic approaches to assess and quantify the proteome available for the production of lasso peptides and lasso peptide analogs. In alternative embodiments, ¹³C metabolic flux analysis (MFA) and/or metabolomics studies are conducted on CFB reaction mixtures and cell extracts to create a flux map and characterize the resulting metabolome of the CFB reaction mixture and cell extract or extracts.

[0212] In some embodiments, the CFB systems provided herein comprise one or more nucleic acid that (i) encodes one or more lasso precursor peptide; (ii) encodes one or more lasso core peptide; (iii) encodes one or more lasso peptide synthesizing enzyme; (iv) encodes one or more lasso peptidase; (v) encodes one or more lasso cylase; (vi) encodes one or more RRE; (vii) forms or encodes one or more components of the in vitro TX-TL machinery; (viii) form or encodes one or more lasso peptide biosynthetic pathway operon; (ix) form one or more biosynthetic gene cluster; (x) form one or more lasso peptide gene cluster; (xi) encodes one or more additional enzymes; (xii) encodes one or more enzyme co-factors; or (xiii) any combination of (i) to (xii). In some embodiments, the nucleic acid that encodes or forms any combination of (i) to (xii) is a single nucleic acid molecule.

[0213] In some embodiments, the nucleic acid molecule comprises one or more sequences selected from the odd numbers of SEQ ID Nos: 1-2630, or a sequence having at least 30% identity thereto. In some embodiments, the nucleic acid molecule comprises at least one sequences selected from the odd numbers of SEQ ID Nos: 1-2630, or a sequence having at least 30% identity thereto, and at least one sequence encoding a lasso peptidase as described herein. In some embodiments, the nucleic acid molecule comprises at least one sequences selected from the odd numbers of SEQ ID Nos: 1-2630 or a sequence encoding a lasso cyclase as described herein. In some embodiments, the nucleic acid molecule comprises at least one sequences selected the odd numbers of SEQ ID Nos: 1-2630 or a sequence having at least 30% identity thereto, and at least one sequence encoding a lasso RRE as described herein. In some embodiments, the nucleic acid molecule comprises at least one sequences selected from the odd numbers of SEQ ID Nos: 1-2630, or a sequence having at least 30% identity thereto, at least one sequence encoding a lasso peptidase as described herein, and at least one sequence encoding a lasso cyclase as described herein. In some embodiments, the nucleic acid molecule comprises at least one sequences selected from the odd numbers of SEQ ID Nos: 1-2630 or a sequence having at least 30% identity thereto, at least one sequence encoding a lasso peptidase as described herein, and at least one sequence encoding a lasso RRE as described herein. In some embodiments, the nucleic acid molecule comprises at least one sequences selected from the odd numbers of SEQ ID Nos: 1-2630 or a sequence having at least 30% identity thereto, at least one sequence encoding a lasso cyclase as described herein, and at least one sequence encoding a lasso RRE as described herein. In some embodiments, the nucleic acid molecule comprises at least one sequences selected from the odd numbers of SEQ ID Nos: 1-2630 or a sequence having at least 30% identity thereto, at least one sequence encoding a lasso peptidase as described herein, and at least one sequence encoding a lasso cyclase as described herein, and at least one sequence encoding a lasso RRE as described herein. In some embodiments, the nucleic acid molecule comprises one or more combination of nucleic acid sequences listed in Table 2.

[0214] In some embodiments, the CFB system comprises one or more nucleic acids encoding for a peptide or polypeptide having a sequence selected from the even number of SEQ ID Nos: 1-2630 or a sequence having at least 30% identity thereto. In some embodiments, the CFB system comprises one or more nucleic acids encoding for a peptide or polypeptide having a sequence selected from peptide Nos: 1316-2336 or a natural sequence having at least 30% identity thereto. In some embodiments, the CFB system comprises one or more nucleic acids encoding for a peptide or polypeptide having a sequence selected from peptide Nos: 2337-3761 or a natural sequence having at least 30% identity thereto. In some embodiments, the CFB system comprises one or more nucleic acids encoding for a peptide or polypeptide having a sequence selected from peptide Nos: 37624593 or a natural sequence having at least 30% identity thereto. In some embodiments, the CFB system comprises at least one nucleic acid encoding for a peptide or polypeptide having a sequence selected from the even number of SEQ ID Nos: 1-2630 or a sequence having at least 30% identity thereto, and at least one nucleic acid encoding for a peptide or polypeptide having a sequence selected from peptide Nos: 1316-2336 or a natural sequence having at least 30% identity thereto. In some embodiments, the CFB system comprises at least one nucleic acid encoding for a peptide or polypeptide having a sequence selected from peptide Nos: 1316-2336 or a natural sequence having at least 30% identity thereto, and at least one nucleic acid encoding for a peptide or polypeptide having a sequence selected from peptide Nos: 2337-3761 or a natural sequence having at least 30% identity thereto. In some embodiments, the CFB system comprises at least one nucleic acid encoding for a peptide or polypeptide having a sequence selected from the even number of SEQ ID Nos: 1-2630 or a sequence having at least 30% identity thereto, and at least one nucleic acid encoding for a peptide or polypeptide having a sequence selected from peptide Nos: 2337-3761 or a natural sequence having at least 30% identity thereto. In some embodiments, the CFB system comprises at least one nucleic acid encoding for a peptide or polypeptide having a sequence selected from the even number of SEQ ID Nos: 1-2630 or a sequence having at least 30% identity thereto, and at least one nucleic acid encoding for a peptide or polypeptide having a sequence selected from peptide Nos: 3762-4593 or a natural sequence having at least 30% identity thereto. In some embodiments, the CFB system comprises at least one nucleic acid encoding for a peptide or polypeptide having a sequence selected from peptide Nos: 1316-2336 or a natural sequence having at least 30% identity thereto, and at least one nucleic acid encoding for a peptide or polypeptide having a sequence selected from peptide Nos: 37624593 or a natural sequence having at least 30% identity thereto. In some embodiments, the CFB system comprises at least one nucleic acid encoding for a peptide or polypeptide having a sequence selected from peptide Nos: 2337-3761 or a natural sequence having at least 30% identity thereto, and at least one nucleic acid encoding for a peptide or polypeptide having a sequence selected from peptide Nos: 37624593 or a natural sequence having at least 30% identity thereto. In some embodiments, the CFB system comprises at least one nucleic acid encoding for a peptide or polypeptide having a sequence selected from the even number of SEQ ID Nos: 1-2630 or a sequence having at least 30% identity thereto, at least one nucleic acid encoding for a peptide or polypeptide having a sequence selected from peptide Nos: 1316-2336 or a natural sequence having at least 30% identity thereto, and at least one nucleic acid encoding for a peptide or polypeptide having a sequence selected from peptide Nos: 2337-3761 or a natural sequence having at least 30% identity thereto. In some embodiments, the CFB system comprises at least one nucleic acid encoding for a peptide or polypeptide having a sequence selected from the even number of SEQ ID Nos: 1-2630 or a sequence having at least 30% identity thereto, at least one nucleic acid encoding for a peptide or polypeptide having a sequence selected from peptide Nos: 1316-2336 or a natural sequence having at least 30% identity thereto, and at least one nucleic acid encoding for a peptide or polypeptide having a sequence selected from peptide Nos: 37624593 or a natural sequence having at least 30% identity thereto. In some embodiments, the CFB system comprises at least one nucleic acid encoding for a peptide or polypeptide having a sequence selected from peptide Nos: 1316-2336 or a natural sequence having at least 30% identity thereto, at least one nucleic acid encoding for a peptide or polypeptide having a sequence selected from peptide Nos: 2337-3761 or a natural sequence having at least 30% identity thereto, and at least one nucleic acid encoding for a peptide or polypeptide having a sequence selected from peptide Nos: 37624593 or a natural sequence having at least 30% identity thereto. In some embodiments, the CFB system comprises at least one nucleic acid encoding for a peptide or polypeptide having a sequence selected from the even number of SEQ ID Nos: 1-2630 or a sequence having at least 30% identity thereto, at least one nucleic acid encoding for a peptide or polypeptide having a sequence selected from peptide Nos: 1316-2336 or a natural sequence having at least 30% identity thereto, at least one nucleic acid encoding for a peptide or polypeptide having a sequence selected from peptide Nos: 2337-3761 or a natural sequence having at least 30% identity thereto, and at least one nucleic acid encoding for a peptide or polypeptide having a sequence selected from peptide Nos: 3762-4593 or a natural sequence having at least 30% identity thereto. In some embodiments, the nucleic acid molecules encode one or more combination of peptides or polypeptides listed in Table 2.

[0215] In some embodiment, a variant of a peptide or of a polypeptide has an amino acid sequence having at least about 30% identity to the peptide or polypeptide. In some embodiment, a homolog of a peptide of a polypeptide has an amino acid sequence having at least about 40% identity to the peptide or polypeptide. In some embodiment, a homolog of a peptide of a polypeptide has an amino acid sequence having at least about 50% identity to the peptide or polypeptide. In some embodiment, a homolog of a peptide of a polypeptide has an amino acid sequence having at least about 60% identity to the peptide or polypeptide. In some embodiment, a homolog of a peptide of a polypeptide has an amino acid sequence having at least about 70% identity to the peptide or polypeptide. In some embodiment, a homolog of a peptide of a polypeptide has an amino acid sequence having at least about 80% identity to the peptide or polypeptide. In some embodiment, a homolog of a peptide of a polypeptide has an amino acid sequence having at least about 90% identity to the peptide or polypeptide. In some embodiment, a homolog of a peptide of a polypeptide has an amino acid sequence having at least about 95% identity to the peptide or polypeptide. In some embodiment, a homolog of a peptide of a polypeptide has an amino acid sequence having at least about 97% identity to the peptide or polypeptide. In some embodiment, a homolog of a peptide of a polypeptide has an amino acid sequence having at least about 98% identity to the peptide or polypeptide. As described herein a peptidic variant includes natural or non-natural variant of the lasso precursor peptide and/or lasso core peptide. As described herein a peptidic variant include natural variant of the lasso peptidase, lasso cyclase and/or RRE.

[0216] In some embodiments, the nucleic acids are isolated or substantially isolated before added into the CFB system. In some embodiments, the nucleic acids are endogenous to a cell extract forming the CFB system. In some embodiments, the nucleic acids are synthesized in vitro. In alternative embodiments, the nucleic acids are in a linear or a circular form. In some embodiments, the nucleic acids are contained in a circular or a linearized plasmid, vector or phage DNA. In alternative embodiments, the nucleic acids comprise enzyme coding sequences operably linked to a homologous or a heterologous transcriptional regulatory sequence, optionally a transcriptional regulatory sequence is a promoter, an enhancer, or a terminator of transcription. In alternative embodiments, the substantially isolated or synthetic nucleic acids comprise at least about 50, 100, 200, 250, 300, 350, 400, 450, 500, 550, 600 or more base pair ends upstream of the promoter and/or downstream of the terminator.

[0217] In alternative embodiments, the CFB system provided herein comprises one or more nucleic acid sequences in the form of expression constructs, vehicles or vectors. In alternative embodiments, nucleic acids used in the CFB system provided herein are operably linked to an expression (e.g., transcription or translational) control sequence, e.g., a promoter or enhancer, e.g., a control sequence functional in a cell from which an extract has been derived. In alternative embodiments, the CFB system comprises one or more nucleic acid molecules in the forms of expression constructs, expression vehicles or vectors, plasmids, phage vectors, viral vectors or recombinant viruses, episomes and artificial chromosomes, including vectors and selection sequences or markers containing nucleic acids. In alternative embodiments, the expression vectors also include one or more selectable marker genes and appropriate expression control sequences.

[0218] In some embodiments, selectable marker genes also can be included, for example, on plasmids that contain genes for lasso peptide synthesis to provide resistance to antibiotics or toxins, to complement auxotrophic deficiencies, or to supply critical nutrients not in an extract. Expression control sequences can include constitutive and inducible promoters, transcription enhancers, transcription terminators, and the like which are well known in the art. When two or more exogenous encoding nucleic acids are to be co-expressed, both nucleic acids can be inserted, for example, into a single expression vehicle (e.g., a vector or plasmid) or in separate expression vehicles. For single vehicle/vector expression, the encoding nucleic acids can be operationally linked to one common expression control sequence or linked to different expression control sequences, such as one inducible promoter and one constitutive promoter.

[0219] In alternative embodiments, nucleic acid analysis such as Northern blots or polymerase chain reaction (PCR) amplification of mRNA, or immunoblotting, are used for analysis of expression of gene products, e.g., enzyme-encoding message; any analytical method can be used to test the expression of an introduced nucleic acid sequence or its corresponding gene product. The exogenous nucleic acid can be expressed in a sufficient amount to produce the desired product, and expression levels can be optimized to obtain sufficient expression.

[0220] In alternative embodiments, multiple enzyme-encoding nucleic acids (e.g., two or more genes) are fabricated on one polycistronic nucleic acid. In alternative embodiments, one or more enzyme-coding nucleic acids of a desired lasso peptide synthetic pathway are fabricated on one linear or circular DNA. In alternative embodiments, all or a subset of the enzyme-encoding nucleic acid of an enzyme-encoding lasso peptide synthesizing operon or biosynthetic gene cluster are contained on separate linear nucleic acids (separate nucleic acid strands), optionally in equimolar concentrations in a whole cell, cytoplasmic or nuclear extract, as described above, and optionally, each separate linear nucleic acid comprises 1, 2, 3, 4, 5, 6, 7, 8, 9, or 10 or more genes or enzyme-encoding sequences, and optionally the linear nucleic acid is present in a cell extract at a concentration of about 10 nM (nanomolar), 15 nM, 20 nM, 25 nM, 30 nM, 35 nM, 40 nM, 45 nM or 50 nM or more or between about 1 nM and 100 nM.

[0221] 5.5 Optimization and Diversifying of Lasso Peptides

[0222] In one aspect, provided herein are CFB systems and related methods for optimizing lasso peptides or lasso peptide analogs for desirable properties and functionality.

[0223] Chemical or Enzymatic Modification

[0224] In some embodiments, the CFB systems comprises one or more components function to modify the lasso peptide or lasso peptide analog produced by the CFB system. In some embodiments, the lasso peptides or lasso peptide analogs produced by the CFB systems or methods are chemically modified. In some embodiments, the lasso peptides or lasso peptide analogs produced by the CFB systems or methods are enzymatically modified.

[0225] In particular embodiments, the core peptides or the lasso peptides produced by cell-free biosynthesis are modified further through chemical steps. In some embodiments, the core peptides or the lasso peptides produced by cell-free biosynthesis are modified through chemical steps that allow the attachment of chemical linker units connected to small molecules to the C-terminus of the core peptide or the lasso peptide. In some embodiments, the core peptides or the lasso peptides produced by cell-free biosynthesis are modified through the attachment of chemical linkers connected to small molecules to the side chain of functionalized amino acids (e.g., the OH or serine, threonine, or tyrosine, or the N of lysine). In other embodiments, the lasso core peptides or the lasso peptides produced by cell-free biosynthesis are modified further through chemical steps. In other embodiments, the lasso core peptides or the lasso peptides produced by cell-free biosynthesis are modified by PEGylation. In other embodiments, the lasso core peptides or the lasso peptides produced by cell-free biosynthesis are modified by biotinylation. In other embodiments, the lasso core peptides or the lasso peptides produced by cell-free biosynthesis are modified through the formation of esters, sulfonyl esters, phosphonate esters, or amides by reaction with the side chain of functionalized amino acids (e.g., the OH or serine, threonine, or tyrosine, or the N of lysine). In yet other embodiments, the core peptides or the lasso peptides produced by cell-free biosynthesis may contain non-natural amino acids which are modified further through chemical steps. In yet other embodiments, the core peptides or the lasso peptides produced by cell-free biosynthesis may contain non-natural amino acids which are modified through the use of click chemistry involving amino acids with azide or alkyne functionality within the side chains (Presolski, S. I., et al., Curr Protoc Chem Biol., 2011, 3, 153-162). In yet other embodiments, the core peptides or the lasso peptides produced by cell-free biosynthesis may contain non-natural amino acids which are modified further through metathesis chemistry involving alkene or alkyne groups within the amino acid side chains (Cromm, P. M., et al., Nat. Comm., 2016, 7, 11300; Gleeson, E. C., et al., Tetrahedron Lett., 2016, 57, 4325-4333).

[0226] In particular embodiments, the lasso peptide or lasso peptide analogs generated by a CFB method or system are modified chemically or by enzyme modification. Exemplary modifications to the lasso peptide or lasso peptide analogs include but are not limited to halogenation, lipidation, pegylation, glycosylation, adding hydrophobic groups, myristoylation, palmitoylation, isoprenylation, prenylation, lipoylation, adding a flavin moiety (optionally comprising addition of: a flavin adenine dinucleotide (FAD) an FADH₂, a flavin mononucleotide (FMN), an FMNH₂), phospho-pantetheinylation, heme C addition, phosphorylation, acylation, alkylation, butyrylation, carboxylation, malonylation, hydroxylation, adding a halide group, iodination, propionylation, S-glutathionylation, succinylation, glycation, adenylation, thiolation, condensation (optionally the “condensation” comprising addition of: an amino acid to an amino acid, an amino acid to a fatty acid, an amino acid to a sugar), or a combination thereof, and optionally the enzyme modification comprises modification of the lasso peptide by one or more enzymes comprising: a CoA ligase, a phosphorylase, a kinase, a glycosyl-transferase, a halogenase, a methyltransferase, a hydroxylase, a lambda phage GamS enzyme (optionally used with a bacterial or an E. coli extract, optionally at a concentration of about 3.5 mM), a Dsb (disulfide bond) family enzyme (optionally DsbA), or a combination thereof, or optionally the enzymes comprise one or more central metabolism enzyme (optionally tricarboxylic acid cycle (TCA, or Krebs cycle) enzymes, glycolysis enzymes or Pentose Phosphate Pathway enzymes), and optionally the chemical or enzyme modification comprises addition, deletion or replacement of a substituent or functional groups, optionally a hydroxyl group, an amino group, a halogen, an alkyl or a cycloalkyl group, optionally by hydration, biotinylation, hydrogenation, an aldol condensation reaction, condensation polymerization, halogenation, oxidation, dehydrogenation, or creating one or more double bonds.

[0227] In some embodiments, cell-free biosynthesis is used to facilitate the creation of mutational variants of lasso peptides using the above method. For example, in some embodiments, the synthesis of codon mutants of the core lasso peptide gene sequence which are used in the cell-free biosynthesis process, thus enabling the creation of high density lasso peptide diversity libraries. In some embodiments, cell-free biosynthesis is used to facilitate the creation of large mutational lasso peptide libraries using, for example, using site-saturation mutagenesis and recombination methods or in vitro display technologies (Josephson, K., et al., Drug Discov. Today, 2014, 19, 388-399; Doi, N., et al., PLoS ONE, 2012, 7, e30084, pp 1-8; Josephson, K., et al., J. Am. Chem. Soc., 2005, 127, 11727-11735; Kretz, K. A., et al, Methods Enzymol., 2004, 388, 3-11; Nannemann, D. P, et al., Future Med Chem., 2011, 3, 809-819).

[0228] In some embodiments, cell-free biosynthesis methods are used to facilitate the creation of mutational variants of lasso peptides by introducing non-natural amino acids into the core peptide sequence, through either biological or chemical means, followed by formation of the lasso structure using the cell-free biosynthesis methods involving, at minimum, a lasso cyclase gene or a lasso cyclase for lasso peptide production as described above.

[0229] Optimization Via Directed Evolution, Mutagenesis or Display Libraries

[0230] As disclosed herein, a set of nucleic acids encoding the desired activities of a lasso peptide biosynthesis pathway can be introduced into a host organism to produce a lasso peptide, or can be introduced into a cell-free biosynthesis reaction mixture containing a cell extract or other suitable medium to produce a lasso peptide. In some cases, it can be desirable to modify the properties or biological activities of a lasso peptide to improve its therapeutic potential. In other cases, it can be desirable to modify the activity or specificity of lasso peptide biosynthesis pathway enzymes or proteins to improve the production of lasso peptides. For example, mutations can be introduced into an encoding nucleic acid molecule (e.g., a gene), which ultimately leads to a change in the amino acid sequence of a protein, enzyme, or peptide, and such mutated proteins, enzymes, or peptides can be screened for improved properties. Such optimization methods can be applied, for example, to increase or improve the activity or substrate scope of an enzyme, protein, or peptide and/or to decrease an inhibitory activity. Lasso peptides are derived from precursor peptides that are ribsomally produces by transcription and translation of a gene. Ribosomally produced peptides, such as lasso precursor peptides, are known to be readily evolved and optimized through variation of nucleotide sequences within genes that encode for the amino acid residues that comprise the peptide. Large libraries of peptide mutational variants have been produced by methods well known in the art, and some of these methods are referred to as directed evolution.

[0231] Directed evolution is a powerful approach that involves the introduction of mutations targeted to a specific gene or an oligonucleotide sequence containing a gene in order to improve and/or alter the properties or production of an enzyme, protein or peptide (e.g., a lasso peptide). Improved and/or altered enzymes, proteins or peptides can be identified through the development and implementation of sensitive high-throughput assays that allow automated screening of many enzyme or peptide variants (for example, >10⁴). Iterative rounds of mutagenesis and screening typically are performed to afford an enzyme or peptide with optimized properties. Computational algorithms that can help to identify areas of the gene for mutagenesis also have been developed and can significantly reduce the number of enzyme or peptide variants that need to be generated and screened (See: Fox, R J., et al., Trends Biotechnol., 2008, 26, 132-138; Fox, R J., et al., Nature Biotechnol., 2007, 25, 338-344). Numerous directed evolution technologies have been developed and shown to be effective at creating diverse variant libraries, and these methods have been successfully applied to the improvement of a wide range of properties across many enzyme and protein classes (for reviews, see: Hibbert et al., Biomol. Eng., 2005,22, 11-19; Huisman and Lalonde, In Biocatalysis in the pharmaceutical and biotechnology industries, pgs. 717-742 (2007), Patel (ed.), CRC Press; Otten and Quax, Biomol. Eng., 2005, 22, 1-9; and Sen et al., Appl. Biochem. Biotechnol., 2007, 143, 212-223). Enzyme and protein characteristics that have been improved and/or altered by directed evolution technologies include, for example: selectivity/specificity, for conversion of non-natural substrates; temperature stability, for robust high temperature processing; pH stability, for bioprocessing under lower or higher pH conditions; substrate or product tolerance, so that high product titers can be achieved; binding (Kₘ), including broadening of ligand or substrate binding to include non-natural substrates; inhibition (Kᵢ), to remove inhibition by products, substrates, or key intermediates; activity (k_{cat}), to increase enzymatic reaction rates to achieve desired flux; isoelectric point (pI) to improve protein or peptide solubility; acid dissociation (pKₐ) to vary the ionization state of the protein or peptide with repect to pH; expression levels, to increase protein or peptide yields and overall pathway flux; oxygen stability, for operation of air-sensitive enzymes or peptides under aerobic conditions; and anaerobic activity, for operation of an aerobic enzyme or peptide in the absence of oxygen.

[0232] A number of exemplary methods have been developed for the mutagenesis and diversification of genes and oligonucleotides to intorduce desired properties into specific enzymes, proteins and peptides. Such methods are well known to those skilled in the art. Any of these can be used to alter and/or optimize the activity of a lasso peptide biosynthetic pathway enzyme, protein, or peptide, including a lasso precursor peptide, a lasso core peptide, or a lasso peptide. Such methods include, but are not limited to error-prone polymerase chain reaction (EpPCR), which introduces random point mutations by reducing the fidelity of DNA polymerase in PCR reactions (See: Pritchard et al., J Theor. Biol., 2005, 234:497-509); Error-prone Rolling Circle Amplification (epRCA), which is similar to epPCR except a whole circular plasmid is used as the template and random 6-mers with exonuclease resistant thiophosphate linkages on the last 2 nucleotides are used to amplify the plasmid followed by transformation into cells in which the plasmid is re-circularized at tandem repeats (Fujii et al., Nucleic Acids Res., 2004, 32:e145; and Fujii et al., Nat. Protoc., 2006, 1, 2493-2497); DNA, Gene, or Family Shuffling, which typically involves digestion of two or more variant genes with nucleases such as Dnase I or EndoV to generate a pool of random fragments that are reassembled by cycles of annealing and extension in the presence of DNA polymerase to create a library of chimeric genes (Stemmer, Proc. Nat. Acad. Sci. USA., 1994, 91, 10747-10751; and Stemmer, Nature, 1994, 370, 389-391); Staggered Extension (StEP), which entails template priming followed by repeated cycles of 2-step PCR with denaturation and very short duration of annealing/extension (as short as 5 sec) (Zhao et al., Nat. Biotechnol., 1998, 16, 258-261); Random Priming Recombination (RPR), in which random sequence primers are used to generate many short DNA fragments complementary to different segments of the template (Shao et al., Nucleic Acids Res., 1998, 26, 681-683).

[0233] Additional methods include Heteroduplex Recombination, in which linearized plasmid DNA is used to form heteroduplexes that are repaired by mismatch repair (See: Volkov et al, Nucleic Acids Res., 1999, 27:e18; Volkov et al., Methods Enzymol., 2000, 328, 456463); Random Chimeragenesis on Transient Templates (RACHITI), which employs Dnase I fragmentation and size fractionation of single-stranded DNA (ssDNA) (See: Coco et al., Nat. Biotechnol., 2001, 19, 354-359); Recombined Extension on Truncated Templates (RETT), which entails template switching of unidirectionally growing strands from primers in the presence of unidirectional ssDNA fragments used as a pool of templates (See: Lee et al., J Mol. Cat., 2003, 26, 119-129); Degenerate Oligonucleotide Gene Shuffling (DOGS), in which degenerate primers are used to control recombination between molecules; (Bergquist and Gibbs, Methods Mol. Biol., 2007, 352, 191-204; Bergquist et al., Biomol. Eng., 2005, 22, 63-72; Gibbs et al., Gene, 2001, 271, 13-20); Incremental Truncation for the Creation of Hybrid Enzymes (ITCHY), which creates a combinatorial library with 1 base pair deletions of a gene or gene fragment of interest (See: Ostermeier et al., Proc. Nat. Acad Sci. USA., 1999, 96, 3562-3567; and Ostermeier et al., Nat. Biotechnol., 1999, 17, 1205-1209); Thio-Incremental Truncation for the Creation of Hybrid Enzymes (THIO-ITCHY), which is similar to ITCHY except that phosphothioate dNTPs are used to generate truncations (See: Lutz et al., Nucleic Acids Res., 2001, 29, E16); SCRATCHY, which combines two methods for recombining genes, ITCHY and DNA Shuffling (See: Lutz et al., Proc. Nat. Acad. Sci. USA., 2001, 98, 11248-11253); Random Drift Mutagenesis (RNDM), in which mutations made via epPCR are followed by screening/selection for those retaining usable activity (See: Bergquist et al., Biomol. Eng., 2005, 22, 63-72); Sequence Saturation Mutagenesis (SeSaM), a random mutagenesis method that generates a pool of random length fragments using random incorporation of a phosphothioate nucleotide and cleavage, which is used as a template to extend in the presence of “universal” bases such as inosine, and replication of an inosine-containing complement gives random base incorporation and, consequently, mutagenesis (See: Wong et al., Biotechnol. J., 2008, 3, 74-82; Wong et al., Nucleic Acids Res., 2004, 32, e26; Wong et al., Anal. Biochem., 2005, 341, 187-189); Synthetic Shuffling, which uses overlapping oligonucleotides designed to encode “all genetic diversity in targets” and allows a very high diversity for the shuffled progeny (See: Ness et al., Nat. Biotechnol., 2002, 20, 1251-1255); Nucleotide Exchange and Excision Technology NexT, which exploits a combination of dUTP incorporation followed by treatment with uracil DNA glycosylase and then piperidine to perform endpoint DNA fragmentation (See: Muller et al., Nucleic Acids Res., 33:e117).

[0234] Further methods include Sequence Homology-Independent Protein Recombination (SHIPREC), in which a linker is used to facilitate fusion between two distantly related or unrelated genes, and a range of chimeras is generated between the two genes, resulting in libraries of single-crossover hybrids (See: Sieber et al., Nat. Biotechnol., 2001, 19, 456460); Gene Site Saturation Mutagenesis™ (GSSM™), in which the starting materials include a supercoiled double stranded DNA (dsDNA) plasmid containing an insert and two primers which are degenerate at the desired site of mutations, enabling all amino acid variations to be introduced individually at each position of a protein or peptide (See: Kretz et al., Methods Enzymol., 2004, 388, 3-11); Combinatorial Cassette Mutagenesis (CCM), which involves the use of short oligonucleotide cassettes to replace limited regions with a large number of possible amino acid sequence alterations (See: Reidhaar-Olson et al. Methods Enzymol., 1991, 208, 564-586; Reidhaar-Olson et al. Science, 1988, 241, 53-57); Combinatorial Multiple Cassette Mutagenesis (CMCM), which is essentially similar to CCM and uses epPCR at high mutation rate to identify hot spots and hot regions and then extension by CMCM to cover a defined region of protein sequence space (See: Reetz et al., Angew. Chem. Int. Ed Engl., 2001, 40, 3589-3591); the Mutator Strains technique, in which conditional ts mutator plasmids, utilizing the mutD5 gene, which encodes a mutant subunit of DNA polymerase III, to allow increases of 20 to 4000× in random and natural mutation frequency during selection and block accumulation of deleterious mutations when selection is not required (See: Selifonova et al., Appl. Environ. Microbiol., 2001, 67, 3645-3649); Low et al., J Mol. Biol., 1996, 260, 3659-3680).

[0235] Additional exemplary methods include Look-Through Mutagenesis (LTM), which is a multidimensional mutagenesis method that assesses and optimizes combinatorial mutations of a selected set of amino acids (See: Rajpal et al, Proc. Natl. Acad Sci. USA., 2005, 102, 8466-8471); Gene Reassembly, which is a homology-independent DNA shuffling method that can be applied to multiple genes at one time or to create a large library of chimeras (multiple mutations) of a single gene (See: Short, J. M., U.S. Pat. No. 5,965,408, Tunable GeneReassembly™); in Silico Protein Design Automation (PDA), which is an optimization algorithm that anchors the structurally defined protein backbone possessing a particular fold, and searches sequence space for amino acid substitutions that can stabilize the fold and overall protein energetics, and generally works most effectively on proteins with known three-dimensional structures (See: Hayes et al., Proc. Natl. Acad. Sci. USA., 2002, 99, 15926-15931); and Iterative Saturation Mutagenesis (ISM), which involves using knowledge of structure/function to choose a likely site for enzyme improvement, performing saturation mutagenesis at chosen site using a mutagenesis method such as Stratagene QuikChange (Stratagene; San Diego Calif.), screening/selecting for desired properties, and, using improved clone(s), starting over at another site and continue repeating until a desired activity is achieved (See: Reetz et al., Nat. Protoc., 2007, 2, 891-903; Reetz et al., Angew. Chem. Int. Ed Engl., 2006, 45, 7745-7751).

[0236] In some embodiments, the systems and libraries disclosed herein may be used in connection with a display technology, such that the components in the present systems and/or libraries may be conveniently screened for a property of interest. Various display technologies are known in the art, for example, involving the use of microbial organism to present a substance of interest (e.g., a lasso peptide or lasso peptide analog) on their cell surface. Such display technology may be used in connection with the present disclosure.

[0237] Furthermore, a rapid way to create large libranes of diverse peptides involves the use of display technologies (For a review, see: Ullman, C. G., et al., Briefings Functional Genomics, 2011, 10, 125-134). Peptide display technologies offer the benefit that specific peptide encoding information (e.g., RNA or DNA sequence information) is linked to, or otherwise associated with, each corresponding peptide in a library, and this information is accessible and readable (e.g., by amplifying and sequencing the attached DNA oligonucleotide) after a screening event, thus enabling identification of the individual peptides within a large library that exhibit desirable properties (e.g., high binding affinity). The cell-free biosynthesis methods provided herein can facilitate and enable the creation of large lasso peptide libraries containing lasso peptide analogs that can be screened for favorable properties. Lasso peptide mutants that exhibit the desired improved properties (hits) may be subjected to additional rounds of mutagenesis to allow creation of highly optimized lasso peptide variants. The CFB methods and systems described herein for the production of lasso peptides and lasso peptide analogs, used in combination with peptide display technologies, establishes a platform to rapidly produce high density libraries of lasso peptide variants and to identify promising lasso peptide analogs with desirable properties.

[0238] In addition to biological methods for the evolution of lasso peptides, also can be conducted using chemical synthesis methods. For example, large combinatorial peptide libraries (e.g., >10⁶ members) containing mutational variants can be synthesized by using known solution phase or solid phase peptide synthesis technologies (See review. Shin, D.-S., et al., J Biochem. Mol. Bio., 2005, 38, 517-525). Chemical peptide synthesis methods can be used to produce lasso precursor peptide variants, or alternatively, lasso core peptide variants, containing a wide range of alpha-amino acids, including the natural proteinogenic amino acids, as well as non-natural and/or non-proteinogenic amino acids, such as amino acids with non-proteinogenic side chains, or alternatively D-amino acids, or alternatively beta-amino acids. Cyclization of these chemically synthesized lasso precursor peptides or lasso core peptides can provide vast lasso peptide diversity that incorporates stereochemical and functional properties not seen in natural lasso peptides.

[0239] Any of the aforementioned methods for lasso peptide mutagenesis and/or display can be used alone or in any combination to improve the performance of lasso peptide biosynthesis pathway enzymes, proteins, and peptides. Similarly, any of the aforementioned methods for mutagenesis and/or display can be used alone or in any combination to enable the creation of lasso peptide variants which may be selected for improved properties.

[0240] In one embodiment of the invention, a mutational library of lasso peptide precursor peptides is created and converted by a lasso peptidase and a lasso cyclase into a library of lasso peptide variants that are screened for improved properties. In another embodiment, a mutational library of lasso core peptides is created and converted by a lasso cyclase into a library of lasso peptide variants that are screened for improved properties.

[0241] In other embodiments of the invention, a mutational library of lasso peptidases is created and screened for improved properties, such as increased temperature stability, tolerance to a broader pH range, improved activity, improved activity without requiring an RRE, broader lasso precursor peptide substrate scope, improved tolerance and rate of conversion of lasso precursor peptide mutational variants, improved tolerance and rate of conversion of lasso precursor peptide N-terminal or C-terminal fusions, improved yield of lasso peptides and lasso peptide analogs, and/or lower product inhibition. In other embodiments of the invention, a mutational library of lasso cyclases is created and screened for improved properties, such as increased temperature stability, tolerance to a broader pH range, improved activity when used in combination with a lasso peptidase to convert a lasso precursor peptide, improved activity on a core peptide lacking a leader peptide, broader lasso precursor peptide substrate scope, broader lasso core peptide substrate scope, improved tolerance and rate of conversion of lasso core peptide mutational variants, improved tolerance and rate of conversion of lasso core peptide C-terminal fusions, improved yield of lasso peptides and lasso peptide analogs, and/or lower product inhibition.

[0242] 5.6 Methods of Producing Lasso Peptides and Lasso Peptide Libraries

[0243] Provided herein are various uses of the present CFB system. In certain aspects, disclosed herein are methods for producing a lasso peptide or lasso peptide analog using the CFB system. In some embodiments, the method for producing a lasso peptide comprises (a) providing a CFB system comprising a minimal set of lasso peptide biosynthesis components; and (b) incubating the CFB system under a suitable condition to produce the lasso peptide. In some embodiments, the minimal set of lasso peptide biosynthesis components comprises one or more components functions to provide a lasso precursor peptide, and one or more components function to process the lasso precursor peptide into the lasso peptide. In some embodiments, the one or more components function to process the lasso precursor peptide into the lasso peptide comprises one or more selected from a lasso peptidase, a lasso cyclase and a RRE. In some embodiments, the one or more components function to process the lasso precursor peptide into the lasso peptide consist of a lasso peptidase and a lasso cyclase.

[0244] In some embodiments, the method for producing a lasso peptide comprises (a) providing a CFB system comprising a minimal set of lasso peptide biosynthesis components; and (b) incubating the CFB system under a suitable condition to produce the lasso peptide. In some embodiments, the minimal set of lasso peptide biosynthesis components comprises one or more components functions to provide a lasso core peptide, and one or more components function to process the lasso core peptide into the lasso peptide. In some embodiments, the one or more components function to process the lasso core peptide into the lasso peptide comprises one or more selected from a lasso peptidase, a lasso cyclase and a RRE. In some embodiments, the one or more components function to process the lasso core into the lasso peptide consist of a lasso cyclase.

[0245] In some embodiments, the method for producing a lasso peptide analog comprises (a) providing a CFB system comprising a minimal set of lasso peptide biosynthesis components; and (b) incubating the CFB system under a suitable condition to produce the lasso peptide analog. In some embodiments, the minimal set of lasso peptide biosynthesis components comprises one or more components functions to provide a lasso precursor peptide, and one or more components function to process the lasso precursor into the lasso peptide analog. In some embodiments, the lasso precursor peptide comprises a lasso core peptide sequence that is mutated as compared to a wild-type sequence. In various embodiments, such mutation can be one or more amino acid substitution, deletion or addition. In some embodiments, the lasso precursor peptide comprises a lasso core peptide sequence that comprises at least one non-natural amino acid. In some embodiments, the one or more components function to process the lasso precursor peptide into the lasso peptide analog comprises an enzyme or chemical entity capable of modifying the lasso precursor peptide sequence or lasso peptide sequence. In various embodiments, such modification can be any chemical or enzymatic modifications described herein.

[0246] In particular embodiments, CFB methods and systems, provided herein for the synthesis of lasso peptides and lasso peptide analogs from a minimal set of lasso peptide biosynthetic pathway components, including processes for in vitro, or cell free, transcription/translation (TX-TL), comprise: (a) providing a CFB reaction mixture, including cell extracts or cell-free reaction media, as described or provided herein; (b) incubating the CFB reaction mixture with substantially isolated or synthetic nucleic acids encoding: a lasso precursor peptide; a lasso core peptide; a lasso peptide synthesizing enzyme or enzymes; a lasso peptide biosynthetic gene cluster, a lasso peptide biosynthetic pathway operon. In other embodiments, optionally provided is, a lasso peptide biosynthetic gene cluster comprising coding sequences for all or substantially all or a minimum set of enzymes for the synthesis of a lasso peptide or lasso peptide analog; a plurality of enzyme-encoding nucleic acids; a plurality of enzyme-encoding nucleic acids for at least two, several or all of the steps in the synthesis of a lasso peptide or lasso peptide analog; and optionally where the substantially isolated or synthetic nucleic acids comprise: (i) a gene or an oligonucleotide from a source other than the cell used for the cell extract (an exogenous nucleic acid), or an exogenous nucleic acid, gene, or oligonucleotide that has been engineered or mutated, optionally engineered or mutated in a protein coding region or in a non-coding region, (ii) a gene or an oligonucleotide from a cell used for the cell extract (an endogenous nucleic acid), or an endogenous nucleic acid that has been engineered or mutated, optionally engineered or mutated in a protein coding region or in a non-coding region, (iii) a gene or an oligonucleotide from one, both or several of the organisms used as a source for the cell extract, or, (iv) any or all of (i) to (iii).

[0247] In certain aspects, disclosed herein are methods for producing a lasso peptide library using the CFB system, the lasso peptide library comprising a plurality of species of lasso peptides and/or lasso peptide analogs, herein referred to as “lasso species.” In various embodiments, the plurality of lasso species in the library may have the same amino acid sequence or different amino acid sequences based on the process the library is generated. For example, in some embodiments, a plurality of lasso species in the library have the same amino acid sequences, while having different chemical or enzymatic modifications to the amino acid residues or side chains in the sequence. In some embodiments, a plurality of lasso species in the library have different amino acid sequences. In some embodiments, the plurality of lasso species in the library may be mixed together. In other embodiments, the plurality of lasso species in the library may be enclosed separately. In some embodiments, the plurality of lasso species forming the library may be individual purified. In other embodiments, the plurality of lasso species forming the library may be mixed with one or more components from the CFB system.

[0248] Various process may be used for generating a lasso peptide library using the CFB system. For example, to generate a lasso peptide library having a plurality of lasso species having different amino acid sequences, in some embodiments, the method comprises (a) providing a CFB system comprising a minimal set of lasso peptide biosynthesis components; and (b) incubating the CFB system under a suitable condition to produce the lasso peptide library; wherein the minimal set of lasso peptide biosynthesis components comprises (i) one or more polynucleotide encoding for a plurality of species of lasso precursor peptides and/or lasso core peptides, (ii) one or more components function to process the lasso precursor peptide and/or lasso core peptide into a plurality of lasso species. In some embodiments, the method further comprises separating the plurality of lasso species from one another.

[0249] In another exemplary embodiments, to generate a lasso peptide library having a plurality of lasso species having different amino acid sequences, in some embodiments, the method comprises (a) providing a CFB system comprising a minimal set of lasso peptide biosynthesis components; and (b) incubating the CFB system under a suitable condition to produce the lasso peptide library; wherein the minimal set of lasso peptide biosynthesis components comprises (i) one or more components function to provide a single species of lasso precursor peptide or lasso core peptide; and (ii) one or more components function to provide a plurality of species of lasso peptidases. In some embodiments, the plurality of species of lasso peptidases are capable of processing the lasso precursor peptide or lasso core peptide into a plurality of species of lasso peptides or lasso peptide analogs. In particular embodiments, the plurality of species of lasso peptidase are capable of cleaving the lasso precursor peptide at different locations to release a plurality of species of lasso core peptides.

[0250] In another exemplary embodiments, to generate a lasso peptide library having a plurality of lasso species having different conformations, in some embodiments, the method comprises (a) providing a CFB system comprising a minimal set of lasso peptide biosynthesis components; and (b) incubating the CFB system under a suitable condition to produce the lasso peptide library; wherein the minimal set of lasso peptide biosynthesis components comprises (i) one or more components function to provide a single species of lasso precursor peptide or lasso core peptide; and (ii) one or more components function to provide a plurality of species of lasso cyclase. In some embodiments, the plurality of species of lasso cyclase are capable of processing the lasso precursor peptide or lasso core peptide into a plurality of lasso species. In particular embodiments, the plurality of species of lasso cyclase are capable of linking the N-terminus of the lasso core peptide to a side chain of an amino acid residue located at different positions within the core peptide.

[0251] In another exemplary embodiments, to generate a lasso peptide library having a plurality of lasso species having both different amino acid sequences and conformations, in some embodiments, the method comprises (a) providing a CFB system comprising a minimal set of lasso peptide biosynthesis components; and (b) incubating the CFB system under a suitable condition to produce the lasso peptide library; wherein the minimal set of lasso peptide biosynthesis components comprises (i) one or more components function to provide a single species of lasso precursor peptide or lasso core peptide; (ii) one or more components function to provide a plurality of species of lasso peptidase; and (iii) one or more components function to provide a plurality of species of lasso cyclase. In some embodiments, the plurality of species of lasso peptidase and lasso cyclase are capable of processing the lasso precursor peptide or lasso core peptide into a plurality of lasso species. In particular embodiments, the plurality of species of lasso peptidase are capable of cleaving the lasso precursor peptide at different locations to release a plurality of species of lasso core peptides, and/or the plurality of species of lasso cyclase are capable of linking the N-terminus of the lasso core peptide to a side chain of an amino acid residue located at different positions within the core peptide.

[0252] In another exemplary embodiments, to generate a lasso peptide library having a plurality of lasso species having the same amino acid sequences with different amino acid modifications, the method comprises (a) providing a CFB system comprising a minimal set of lasso peptide biosynthesis components; and (b) incubating the CFB system under a suitable condition to produce the lasso peptide library; wherein the minimal set of lasso peptide biosynthesis components comprises (i) one or more polynucleotide encoding for a single species of a lasso precursor peptide or lasso core peptide, (ii) one or more components function to process the lasso precursor peptide or lasso core peptide into a single species of lasso peptide; (iii) one or more components function to modify the lasso peptide into a plurality of species having different amino acid modifications. In some embodiments, the method further comprises incubating the CFB system under a first condition suitable for generating a first species, and incubating the CFB system under a second condition suitable for generating a second species. In some embodiments, the method further comprises incubating the CFB system under a third or more conditions for generating a third or more species. In some embodiments, to generate species having diversified modifications, the method further comprises sequentially supplementing the CFB system with multiple components, each capable of generating a different species. In some embodiments, the method further comprises separating the species from one another.

[0253] In yet exemplary embodiments, to generate a lasso peptide library comprising lasso species having both diversified amino acid sequences and diversified amino acid modifications, the method comprises (a) providing a CFB system comprising a minimal set of lasso peptide biosynthesis components; and (b) incubating the CFB system under a suitable condition to produce the lasso peptide library; wherein the minimal set of lasso peptide biosynthesis components comprises (i) one or more components function to provide a plurality of species of lasso precursor peptides or lasso core peptides, (ii) one or more components function to process the lasso precursor peptide or lasso core peptide into a plurality of lasso species; and (iii) one or more components function to further diversify the lasso species into a plurality of species having different amino acid modifications.

[0254] In some embodiments, methods for generating a lasso peptide library comprises (a) providing a CFB system comprising a minimal set of lasso peptide biosynthesis components; and (b) incubating the CFB system under a suitable condition to produce the lasso peptide library; wherein the CFB system comprises (i) one or more components function to provide at least one lasso precursor peptides or lasso core peptides; (ii) one or more components function to provide a plurality of species of lasso peptidase; (ii) one or more components function to provide a plurality of species of lasso cyclase; (iv) one or more components function to further diversify the lasso species generated in the CFB system into a plurality of species having different amino acid modifications.

[0255] In some embodiments of the method for generating the library, the amino acid modifications are selected from the chemical modifications and enzymatic modifications described herein. In some embodiments, the polynucleotides encoding for a lasso precursor peptides or lasso core peptides is identified using a genomic mining algorithm as described herein. In some embodiments, the polynucleotides encoding for a lasso precursor peptides or lasso core peptides is identified using a mutagenesis method as described herein.

[0256] In some embodiments, cell-free biosynthesis systems are used to facilitate the discovery of new lasso peptides from Nature using the above methods involving, for example, the identification of lasso peptide biosynthesis genes using bioinformatic genome-mining algorithms followed by cloning or synthesis of pathway genes which are used in the cell-free biosynthesis process, thus enabling the rapid generation of new lasso peptide diversity libraries.

[0257] In some embodiments, cell-free biosynthesis systems are used to facilitate the creation of mutational variants of lasso peptides using methods involving, for example, the synthesis of codon mutants of the lasso precursor peptide or lasso core peptide gene sequence. Lasso precursor peptide or lasso core peptide gene or oligonucleotide mutants can be used in a cell-free biosynthesis process, thus enabling the creation of high density lasso peptide diversity libraries. In some embodiments, cell-free biosynthesis is used to facilitate the creation of large mutational lasso peptide libraries using, for example, site-saturation mutagenesis and recombination methods, or in vitro display technologies such as, for example, phage display, RNA display or DNA display (See: Josephson, K., et al., Drug Discov. Today, 2014, 19, 388-399; Doi, N., et al., PLoS ONE, 2012, 7, e30084, pp 1-8; Josephson, K., et al., J Am. Chem. Soc., 2005, 127, 11727-11735; Odegrip, R., et al., Proc. Nat. Acad Sci. USA., 2004, 101, 2806-2810; Gamkrelidze, M., Dabrowska, K., Arch Microbiol, 2014, 196, 473-479; Kretz, K. A., et al, Methods Enzymol., 2004, 388, 3-11; Nannemann, D. P, et al., Future Med Chem., 2011, 3, 809-819). In some embodiments, cell-free biosynthesis systems are used to facilitate the creation of mutational variants of lasso peptides by introducing non-natural amino acids into the core peptide sequence, followed by formation of the lasso structure using the cell-free biosynthesis methods for lasso peptide production as described above.

[0258] In various embodiments of the method for generating the library, the one or more components function to provide the lasso precursor peptide comprises the lasso precursor peptide. In some embodiments, the lasso precursor peptide comprises a sequence selected from the even number of SEQ ID Nos: 1-2630. In some embodiments, the one or more components function to provide the lasso precursor peptide comprises a polynucleotide encoding the lasso precursor peptide. In some embodiments, the polynucleotide encoding the lasso precursor peptide comprises a sequence selected from the odd number of SEQ ID Nos: 1-2630. In some embodiments, the polynucleotide comprises an open reading frame encoding the lasso peptide operably linked to at least one TX-TL regulatory element. In some embodiments, the at least one TX-TL regulatory element is known in the art.

[0259] In various embodiments of the method for generating the library, the one or more components function to process the lasso precursor peptide into the lasso peptide comprises one or more components function to provide a lasso peptidase activity in the CFB system. In some embodiments, the one or more components function to process the lasso precursor peptide into the lasso peptide comprises one or more components function to provide a lasso cyclase activity in the CFB system. In some embodiments, the one or more components function to process the lasso precursor peptide into the lasso peptide comprises one or more components function to provide a lasso peptidase activity and a lasso cyclase activity in the CFB system.

[0260] In various embodiments of the method for generating the library, the components function to provide the lasso peptidase activity in the CFB system comprise a lasso peptidase. In some embodiments, the components function to provide the lasso peptidase activity in the CFB system comprise a peptide or polypeptide having a sequence selected from peptide Nos: 1316-2336. In some embodiments, the components function to provide the lasso cyclase activity in the CFB system comprise a lasso cyclase. In some embodiments, the components function to provide the lasso cyclase activity in the CFB system comprise a peptide or polypeptide having a sequence selected from peptide Nos: 2337-3761. In some embodiments, the components function to provide the lasso peptidase activity in the CFB system comprise a polynucleotide encoding the lasso peptidase. In some embodiments, the components function to provide the lasso cyclase activity in the CFB system comprise a polynucleotide encoding the lasso cyclase.

[0261] In various embodiments of the method for generating the library, the one or more components function to process the lasso precursor peptide into the lasso peptide comprises one or more components function to provide a RRE. In some embodiments, the components function to provide the RRE in the CFB system comprise a peptide or polypeptide having a sequence selected from peptide Nos: 37624593. In some embodiments, the components function to provide the RRE in the CFB system comprise a polynucleotide encoding the RRE.

[0262] In alternative embodiments, CFB methods and systems enable in vitro cell-free transcription/translation systems (TX-TL) and function as rapid prototyping platforms for the synthesis, modification and identification of products, e.g., lasso peptides or lasso peptide analogs, from a minimal set of lasso peptide biosynthetic pathway components. In alternative embodiments, CFB systems are used for the combinatorial biosynthesis of lasso peptides or lasso peptide analogs, from a minimal set of lasso peptide biosynthetic pathway components, such as those provided in the present invention. In alternative embodiments, CFB systems are used for the rapid prototyping of complex biosynthetic pathways as a way to rapidly assess combinatorial designs for the synthesis of lasso peptides that bind to a specific biological target. In alternative embodiments, these CFB systems are multiplexed for high-throughput automation to rapidly prototype lasso peptide biosynthetic pathway genes and proteins, the lasso peptides they encode and synthesize, and lasso peptide analogs, such as the lasso peptides cited in the present invention. CFB methods and systems, including those involving the use of in vitro TX-TL, are described in Culler, S. et al., PCT Application WO2017/031399 A1, and is incorporated herein by reference.

[0263] In alternative embodiments, CFB methods and systems provided herein to produce lasso peptides and lasso peptide analogs from a minimal set of lasso peptide biosynthetic pathway components are used for the rapid identification and combinatorial biosynthesis of lasso peptide or lasso peptide analogs. An exemplary feature of this platform is that an unprecedented level of chemical diversity of lasso peptides and lasso peptide analogs can be created and explored. In alternative embodiments, combinatorial biosynthesis approaches are executed through the variation and modification of lasso peptide pathway genes, using different refactored lasso peptide gene cluster combinations, using combinations of genes from different lasso peptide gene clusters, using genes that encode enzymes that introduce chemical modifications before or after formation of the lasso peptide, using alternative lasso peptide precursor combinations (e.g., varied amino acids), using different CFB reaction mixtures, supplements or conditions, or by a combination of these alternatives.

[0264] Combinatorial CFB methods as provided herein can be used to produce libraries of new compounds, including lasso peptide libraries. For example, an exemplary refactored lasso peptide pathway can vary enzyme specificity at any step or add enzymes to introduce new functional groups and analogs at any one or more sites in a lasso peptide. Exemplary processes can vary enzyme specificity to allow only one functional group in a mixture to pass to the next step, thus allowing each reaction mixture to generate a specific lasso peptide analog. Exemplary processes can vary the availability of functional groups at any step to control which group or groups are added at that step. Exemplary processes can vary a domain of an enzyme to modify its specificity and lasso peptide analog created. Exemplary processes can add a domain of an enzyme or an entire enzyme module to add novel chemical reaction steps to the lasso peptide pathway.

[0265] In alternative embodiments, CFB methods and systems provided herein to produce lasso peptides and lasso peptide analogs from a minimal set of lasso peptide biosynthetic pathway components overcome a primary challenge in lasso peptide discovery—that many predicted lasso peptide gene clusters cannot be expressed under laboratory conditions in the native host, or when cloned into a heterologous host. In alternative embodiments, CFB methods and systems provided herein to produce lasso peptides and lasso peptide analogs from a minimal set of lasso peptide biosynthetic pathway components, including the use of cell extracts for in vitro transcription/translation (TX-TL) systems express novel lasso peptide biosynthetic gene clusters without the regulatory constraints of the cell. In alternative embodiments, some or all of the lasso peptide pathway biosynthetic genes are refactored to remove native transcriptional and translational regulation. In alternative embodiments, some or all of the lasso peptide pathway biosynthetic genes are refactored and constructed into operons on plasmids.

[0266] Metabolic modeling and simulation algorithms can be utilized to optimize conditions for the CFB process and to optimize lasso peptide production rates and yields in the CFB system. Modeling can also be used to design gene knockouts that additionally optimize utilization of the lasso peptide pathway (see, for example, U.S. patent publications US 2002/0012939, US 2003/0224363, US 2004/0029149, US 2004/0072723, US 2003/0059792, US 2002/0168654 and US 2004/0009466, and U.S. Pat. No. 7,127,379). Modeling analysis allows reliable predictions of the effects on shifting the primary metabolism towards more efficient production of lasso peptides and lasso peptide analogs.

[0267] One computational method for identifying and designing metabolic alterations favoring biosynthesis of a desired product is the OptKnock computational framework (Burgard et al., Biotechnol. Bioeng., 2003, 84, 647-657). OptKnock is a metabolic modeling and simulation program that suggests gene deletion or disruption strategies that result in genetically stable metabolic network which overproduces the target product. Specifically, the framework examines the complete metabolic and/or biochemical network in order to suggest genetic manipulations that lead to maximum production of a lasso peptide or lasso peptide analog. Such genetic manipulations can be performed on strains used to produce cell extracts for the CFB methods and processes provided herein. Also, this computational methodology can be used to either identify alternative pathways that lead to biosynthesis of a desired lasso peptide or used in connection with non-naturally occurring systems for further optimization of biosynthesis of a desired lasso peptide.

[0268] Briefly, OptKnock is a term used herein to refer to a computational method and system for modeling cellular metabolism. The OptKnock program relates to a framework of models and methods that incorporate particular constraints into flux balance analysis (FBA) models. These constraints include, for example, qualitative kinetic information, qualitative regulatory information, and/or DNA microarray experimental data. OptKnock also computes solutions to various metabolic problems by, for example, tightening the flux boundaries derived through flux balance models and subsequently probing the performance limits of metabolic networks in the presence of gene additions or deletions. OptKnock computational framework allows the construction of model formulations that allow an effective query of the performance limits of metabolic networks and provides methods for solving the resulting mixed-integer linear programming problems. The metabolic modeling and simulation methods referred to herein as OptKnock are described in, for example, U.S. publication 2002/0168654, filed Jan. 10, 2002, in International Patent No. PCT/US02/00660, filed Jan. 10, 2002, and U.S. publication 2009/0047719, filed Aug. 10, 2007.

[0269] Another computational method for identifying and designing metabolic alterations favoring biosynthetic production of a product is a metabolic modeling and simulation system termed SimPheny®. This computational method and system is described in, for example, U.S. publication 2003/0233218, filed Jun. 14, 2002, and in International Patent Application No. PCT/US03/18838, filed Jun. 13, 2003. SimPheny® is a computational system that can be used to produce a network model in silico and to simulate the flux of mass, energy or charge through the chemical reactions of a biological system to define a solution space that contains any and all possible functionalities of the chemical reactions in the system, thereby determining a range of allowed activities for the biological system. This approach is referred to as constraints-based modeling because the solution space is defined by constraints such as the known stoichiometry of the included reactions as well as reaction thermodynamic and capacity constraints associated with maximum fluxes through reactions. The space defined by these constraints can be interrogated to determine the phenotypic capabilities and behavior of the biological system or of its biochemical components.

[0270] These computational approaches are consistent with biological realities because biological systems are flexible and can reach the same result in different ways. Biological systems are designed through evolutionary mechanisms that have been restricted by fundamental constraints that all living systems face. Therefore, constraints-based modeling strategy embraces these general realities. Further, the ability to continuously impose further restrictions on a network model via the tightening of constraints results in a reduction in the size of the solution space, thereby enhancing the precision with which biosynthetic performance can be predicted.

[0271] Given the teachings and guidance provided herein, those skilled in the art will be able to apply various computational frameworks for metabolic modeling and simulation to design and implement biosynthesis of lasso peptides or lasso peptide analogs using cell extracts and the CFB methods and processes provided herein for the synthesis of lasso peptides and lasso peptide analogs from a minimal set of lasso peptide biosynthetic pathway genes. Such metabolic modeling and simulation methods include, for example, the computational systems exemplified above as SimPheny® and OptKnock. Those skilled in the art will know how to apply the identification, design and implementation of the metabolic alterations using OptKnock to any of such other metabolic modeling and simulation computational frameworks and methods well known in the art.

[0272] 5.7 Methods for Screening for CFB Products

[0273] In certain aspects, provided herein are also methods for screening products produced by the CFB system and related methods provided herein, including methods for screening lasso peptide and/or lasso peptide analogs for those with desirable properties, such as therapeutic properties.

[0274] In some embodiments, provided herein are methods for screening candidate lasso peptide or lasso peptide analogs for binding affinity to a predetermined target. In some embodiments, the target is a cell surface molecule. In some embodiments, binding of the lasso peptide or lasso peptide analog to the target activates a signaling pathway in a cell. In some embodiments, binding of the lasso peptide or lasso peptide analog to the target inhibits a cellular signaling pathway. In some embodiments, the cellular signaling pathway can be intracellular and/or intercellular. In some embodiments, the activation and/or inhibition of the cellular signaling pathway is useful for treating or preventing a diseased condition in the cell. Accordingly, lasso peptides and lasso peptide analogs screened and selected herein can be suitable for treating or preventing the diseased condition in a subject.

[0275] In some embodiments, the method for screening lasso peptides or lasso peptide analogs comprises contacting a candidate lasso peptide with a target; and measuring the binding affinity between the lasso peptide or lasso peptide analog and the target. In some embodiments, the target is in purified form. In other embodiments, the target is present in a sample.

[0276] In some embodiments, the method for screening lasso peptides or lasso peptide analogs comprises contacting a candidate lasso peptide with a cell expressing the target; and detecting a signal associated with a cellular signaling pathway of interest from the cell. In some embodiments, the signaling pathway is inhibited by a candidate lasso peptide or lasso peptide analog. In other embodiments, the signaling pathway is activated by a candidate lasso peptide or lasso peptide analog. In particular embodiments, the target is G protein-couple receptors (GPCRs).

[0277] In some embodiments, the method for screening lasso peptides or lasso peptide analogs comprises contacting a candidate lasso peptide with a subject expressing the target; and measuring a signal associated with a phenotype of interest from the subject. In some embodiments, the phenotype is a disease phenotype.

[0278] In some embodiments, binding of the lasso peptide or lasso peptide analog to the target facilitates delivery of the lasso peptide or lasso peptide analog to the target. Accordingly, in some embodiments, the method for screening lasso peptides or lasso peptide analogs comprises contacting a candidate lasso peptide or lasso peptide analog with a target; and detecting localization of the lasso peptide or lasso peptide analog near the target. In some embodiments, the lasso peptide or lasso peptide analog is comprised within a larger molecule, and detecting localization of the lasso peptide or lasso peptide analog is performed by detecting the localization of such larger molecule or a portion thereof. In various embodiments, the larger molecule is a conjugate, a complex or a fusion molecule comprising the lasso peptide or lasso peptide analog. In some embodiments, detecting localization of the larger molecule comprising the lasso peptide or lasso peptide analog is performed by detecting a signal produced by such larger molecule. In some embodiments, detecting localization of the larger molecule comprising the lasso peptide or lasso peptide analog is performed by detecting an effect produced by such larger molecule. In some embodiments, the larger molecule comprises the lasso peptide and a therapeutic agent, and detecting localization of the larger molecule is performed by detecting a therapeutic effect of the therapeutic agent. In some embodiments, the therapeutic effect is in vivo. In other embodiments, the therapeutic effect is in vitro. Accordingly, lasso peptides and lasso peptide analogs screened and selected herein can be suitable for targeted delivery of a therapeutic agent to a target location within a subject.

[0279] In some embodiments, binding of the lasso peptide or lasso peptide analog to the target facilitates purifying the target from the sample. In some embodiments, the target is comprised in a sample, and binding of the lasso peptide or lasso peptide analog to the target facilitates detecting the target from the sample. In some embodiments, detecting the target from the sample is indicative of the presence of a phenotype of interest in a subject providing the sample. In some embodiments, the phenotype is a diseased phenotype. Accordingly, lasso peptides and lasso peptide analogs screened and selected herein can be suitable for diagnosing the disease from a subject.

[0280] In various embodiments, any method for screening for a desired enzyme activity, e.g., production of a desired product, e.g., such as a lasso peptide or lasso peptide analog, can be used. Any method for isolating enzyme products or final products, e.g., lasso peptides or lasso peptide analogs, can be used. In alternative embodiments, methods and compositions of the invention comprise use of any method or apparatus to detect a purposefully biosynthesized organic product, e.g., lasso peptide or lasso peptide analog, or supplemented or microbially-produced organic products (e.g., amino acids, CoA, ATP, carbon dioxide), by e.g., employing invasive sampling of either cell extract or headspace followed by subjecting the sample to gas chromatography or liquid chromatography often coupled with mass spectrometry.

[0281] In some embodiments, the methods of screening lasso peptides and lasso peptide analogs comprises screening lasso peptides and lasso peptide analogs from a lasso peptide library as provided herein. In alternative embodiments, the apparatus and instruments are designed or configured for High Throughput Screening (HTS) and analysis of products, e.g., lasso peptides or lasso peptide analogs, produced by CFB methods and processes as provided herein, by detecting and/or measuring the products, e.g., lasso peptides, either directly or indirectly, in soluble form by sampling a CFB cell-free extract or medium. For example, either the FastQuan™ High-Throughput LCMS System from Thermo Fisher (Waltham, Mass., USA) or the StreamSelect™ LCMS System from Agilent Technologies (Santa Clara, Calif., USA) can be used to rapidly assay and identify production of lasso peptides or lasso peptide analogs in a CFB process implemented using 96-well, 384-well, or 1536-well plates.

[0282] In alternative embodiments, CFB methods and processes are automatable and suitable for use with laboratory robotic systems, eliminating or reducing operator involvement, while providing for high-throughput biosynthesis and screening.

[0283] Also provided are methods for screening a lasso peptide or lasso peptide analog or a library of lasso peptides or lasso peptide analogs, produced by a CFB method or process, including the use of a TX-TL system, for an activity of interest. For example, the activity can be for a pharmaceutical, agricultural, nutraceutical, nutritional or animal veterinary or health and wellness function.

[0284] Also provided are methods for screening the CFB reaction mixture for: (i) a modulator of protein activity or metabolic function; (ii) a toxic metabolite, peptide or protein; (iii) an inhibitor of transcription or translation, comprising: (a) providing a CFB reaction mixture as described or provided herein, wherein the CFB reaction mixture comprises at least one protein-encoding nucleic acid which leads to the formation of a lasso peptide or lasso peptide analog; (b) providing a test compound; (c) combining or mixing the test compound with the CFB reaction mixture under conditions wherein the CFB reaction mixture initiates or completes transcription and/or translation, or modifies a molecule, optionally a protein, a small molecule, a natural product, a lasso peptide, or a lasso peptide analog, and, (d) determining or measuring any change in the functioning of the CFB reaction mixture, or the transcription and/or translation machinery, or in the formation of lasso peptide products, wherein determining or measuring a change in the protein activity, transcription or translation or metabolic function identifies the test compound as a modulator of that protein activity, transcription or translation or metabolic function.

[0285] Also provided are methods screening for: a modulator of protein activity, transcription, or translation or cell function; a toxic metabolite or a protein; a cellular toxin; an inhibitor or of transcription or translation, comprising: (a) providing a CFB method and a cell extract or TX-TL composition described herein, wherein the composition comprises at least one protein-encoding nucleic acid; (b) providing a test compound; (c) combining or mixing the test compound with the cell extract under conditions wherein the TX-TL extract initiates or completes transcription and/or translation, or modifies a molecule (optionally a protein, a small molecule, a natural product, natural product analog, a lasso peptide, or a lasso peptide analog) and (d) determining or measuring any change in the functioning or products of the extract, or the transcription and/or translation, wherein determining or measuring a change in the protein activity, transcription or translation or cell function identifies the test compound as a modulator of that protein activity, transcription or translation or cell function.

[0286] Also provided are methods for screening of lasso peptides or lasso peptide analogs produced in a CFB system, whereby the CFP reaction mixture is directly assayed for biological activity, or optionally lasso peptides and analogs are substantially isolated and purified, comprising: (a) providing a CFB reaction mixture with a cell extract as described herein, wherein the composition comprises at least one protein-encoding nucleic acid; (b) providing a lasso precursor peptide, lasso precursor peptide gene, lasso core peptide, or lasso core peptide gene; (c) combining or mixing the lasso precursor peptide, lasso precursor gene, lasso core peptide, or lasso core peptide gene with the cell extract under conditions wherein the lasso precursor peptide, lasso peptide gene, lasso core peptide, or lasso core peptide gene is converted to form a lasso peptide or lasso peptide analog, and (d) directly contacting the CFB reaction mixture, containing the products of transcription and/or translation, including lasso peptides or lasso peptide analogs, with a protein, enzyme, receptor, or cell, wherein a change in protein activity, transcription or translation, or cell function is measured and detected and identifies the lasso peptide or lasso peptide analog as a modulator of biological activity, such as protein binding, enzyme activity, cell surface receptor activity, or cell growth; or (e) optionally substantially isolating and purifying the lasso peptides or lasso peptide analogs and contacting the lasso peptides or lasso peptide analogs, with a protein, enzyme, receptor, or cell, wherein the biological activity or cell function is measured and detected and identifies the lasso peptide or lasso peptide analog as a modulator of biological activity, such as protein binding, enzyme activity, cell surface receptor activity, or cell growth.

[0287] 5.8 Analysis and Isolation of Lasso Peptides and Lasso Peptide Analogs

[0288] Suitable purification and/or assays to test for the production of lasso peptides or lasso peptide analogs can be performed using well known methods. Suitable replicates such as triplicate CFB reactions, can be conducted and analyzed to verify lasso peptide production and concentrations. The final lasso peptide product and any intermediates, and other organic compounds, can be analyzed by methods such as HPLC (High Performance Liquid Chromatography), GC-MS (Gas Chromatography-Mass Spectrometry), LC-MS (Liquid Chromatography-Mass Spectrometry), MALDI or other suitable analytical methods using routine procedures well known in the art. Byproducts and residual amino acids or glucose can be quantified by HPLC using, for example, a refractive index detector for glucose and saturated fatty acids, and a UV detector for amino acids and other organic acids (Lin et al., Biotechnol. Bioeng, 2005, 90, 775-779), or other suitable assay and detection methods well known in the art. The individual enzyme or protein activities from the exogenous or endogenous DNA sequences can also be assayed using methods well known in the art. For example, the activity of phenylpyruvate decarboxylase can be measured using a coupled photometric assay with alcohol dehydrogenase as an auxiliary enzyme (See: Weiss et al., Biochem, 1988, 27, 2197-2205). NADH- and NADPH-dependent enzymes such as acetophenone reductase can be followed spectrophotometrically at 340 nm (See: Schlieben et al, J. Mol. Biol., 2005, 349, 801-813). For typical hydrocarbon assay methods, see Manual on Hydrocarbon Analysis (ASTM Manula Series, A. W. Drews, ed., 6th edition, 1998, American Society for Testing and Materials, Baltimore, Md.

[0289] Lasso peptides and lasso peptide analogs can be isolated, separated purified from other components in the CFB reaction mixtures using a variety of methods well known in the art. Such separation methods include, for example, extraction procedures, including extraction of CFB reaction mixtures using organic solvents such as methanol, butanol, ethyl acetate, and the like, as well as methods that include continuous liquid-liquid extraction, solid-liquid extraction, solid phase extraction, pervaporation, membrane filtration, membrane separation, reverse osmosis, electrodialysis, dialysis, distillation, crystallization, centrifugation, extractive filtration, ion exchange chromatography, size exclusion chromatography, adsorption chromatography, ultrafiltration, medium pressure liquid chromatography (MPLC), and high pressure liquid chromatography (HPLC). All of the above methods are well known in the art and can be implemented in either analytical or preparative modes.

[0290] 5.9 Identifying and Modifying Lasso Peptide Biosynthetic Genes, Gene Clusters, Enzymes, and Pathways

[0291] Provided herein are methods of identifying and/or modifying an enzyme-encoding lasso peptide synthesizing operon; a lasso peptide biosynthetic gene cluster; a plurality of enzyme-encoding nucleic acids for lasso precursor peptides or lasso core peptides and at least one, several or all of the steps in the synthesis of a lasso peptide or lasso peptide analog upon transforming a lasso precursor peptide or lasso core peptide. In alternative embodiments, provided are engineered or modified enzyme-encoding lasso peptide synthesizing operons; lasso peptide biosynthetic gene clusters; and/or enzyme-encoding nucleic acids for lasso precursor peptides or lasso core peptides and at least one, several or all of the steps in the synthesis of a lasso peptide or lasso peptide analog upon transforming a lasso precursor peptide or lasso core peptide, or libraries thereof, made by these methods. In alternative embodiments, provided are libraries of lasso peptides or lasso peptide analogs made by these methods, and compositions as provided herein. In alternative embodiments, these modifications comprise one or more combinatorial modifications that result in generation of desired lasso peptides or lasso peptide analogs, or libraries of lasso peptides or lasso peptide analogs.

[0292] In alternative embodiments, the one or more combinatorial modifications comprise deletion or inactivation one or more individual genes, in a gene cluster for the biosynthesis, or altered biosynthesis, ultimately leading to a minimal optimum gene set for the biosynthesis of lasso peptides or lasso peptide analogs.

[0293] In alternative embodiments, the one or more combinatorial modifications comprise domain engineering to fuse protein (e.g., enzyme) domains, shuffled domains, adding an extra domain, exchange of one or more (multiple) domains, or other modifications to alter substrate activity or specificity of an enzyme involved in the biosynthesis or modification of the lasso peptides or lasso peptide analogs.

[0294] In alternative embodiments, the one or more combinatorial modifications comprise modifying, adding or deleting a “tailoring” enzyme that act after the biosynthesis of a core backbone of the lasso peptide or lasso peptide analog is completed, optionally comprising N-methyltransferases, O-methyltransferases, biotin ligases, glycosyltransferases, esterases, acylases, acyltransferases, aminotransferases, amidases, hydroxylases, dehydrogenases, halogenases, kinases, RiPP heterocyclases, RiPP cyclodehydratases, and prenyltransferases. In this embodiment, lasso peptides or lasso peptide analogs are generated by the action (e.g., modified action, additional action, or lack of action (as compared to wild type)) of the “tailoring” enzymes.

[0295] In alternative embodiments, the one or more combinatorial modifications comprise combining lasso peptide biosynthetic genes from various sources to construct artificial lasso peptide biosynthesis gene clusters, or modified lasso peptide biosynthesis gene clusters.

[0296] In alternative embodiments, functional or bioinformatic screening methods are used to discover and identify biocatalysts, genes and gene clusters, e.g., lasso peptide biosynthetic gene clusters, for use the CFB methods and processes as described herein. Environmental habitats of interest for the discovery of lasso peptides includes soil and marine environments, for example, through DNA sequence data generated through either genomic or metagenomic sequencing.

[0297] In alternative embodiments, enzyme-encoding lasso peptide synthesizing operons; lasso peptide biosynthetic gene clusters; and/or enzyme-encoding nucleic acids for lasso precursor peptides or lasso core peptides and at least one, several or all of the steps in the synthesis of a lasso peptide or lasso peptide analog upon transforming a lasso precursor peptide or lasso core peptide, or libraries thereof, made by the CFB methods and processes provided herein, are identified by methods comprising e.g., use of: a genomic or biosynthetic search engine, optionally WARP DRIVE BIO™ software, anti-SMASH (ANTI-SMASH™) software (See: Blin, K., et al., Nucleic Acids Res., 2017, 45, W36-W41), iSNAP™ algorithm (See: Ibrahim, A., et al., Proc. Nat. Acad Sci., USA., 2012, 109, 19196-19201), CLUSTSCAN™ (Starcevic, et al., Nucleic Acids Res., 2008, 36, 6882-6892), NP searcher (Li et al. (2009) Automated genome mining for natural products. BMC Bioinformatics, 10, 185), SBSPKS™ (Anand, et al. Nucleic Acids Res., 2010, 38, W487-W496), BAGEL3™ (Van Heel, et al., Nucleic Acids Res., 2013, 41, W448-W453), SMURF™ (Khaldi et al., Fungal Genet. Biol., 2010, 47, 736-741), ClusterFinder (CLUSTERFINDER™) or ClusterBlast (CLUSTERBLAST™) algorithms, the RODEO algorithm (See: Tietz, J. I., et al., Nature Chem Bio, 2017, 13, 470-478), or a combination there of, or, an Integrated Microbial Genomes (IMG)-ABC system (DOE Joint Genome Institute (JGI)).

[0298] In alternative embodiments, lasso peptide biosynthetic gene clusters for use in CFB methods and processes as provided herein are identified by mining genome sequences of known bacterial natural product producers using established genome mining tools, such as anti-SMASH, BAGEL3, and RODEO. These genome mining tools can also be used to identify novel biosynthetic genes (for use in CFB systems and processes as provided herein) within metagenomic based DNA sequences.

[0299] In alternative embodiments, CFB reaction mixtures and cell extracts as provided herein use (incorporate, or comprise) protein machinery that is responsible for the biosynthesis of secondary metabolites inside prokaryotic and eukaryotic cells; this “machinery” can comprise enzymes encoded by gene clusters or operons. In alternative embodiments, so-called “secondary metabolite biosynthetic gene clusters (SMBGCs) are used; they contain all the genes for the biosynthesis, regulation and/or export of a product, e.g., a lasso peptide. In vivo genes are encoded (physically located) side-by-side, and they can be used in this “side-by-side” orientation in (e.g., linear or circular) nucleic acids used in the CFB method and processes using cell extracts as provided herein, or they can be rearranged, or segmented into one or more linear or circular nucleic acids.

[0300] In alternative embodiments, the identified lasso peptide biosynthetic gene clusters and/or biosynthetic genes are ‘refactored’, e.g., where the native regulatory parts (e.g. promoter, RBS, terminator, codon usage etc.) are replaced e.g., by synthetic, orthogonal regulation with the goal of optimization of enzyme expression in a cell extract as provided herein and/or in a heterologous host (See: Tan, G.-Y., et al., Metabolic Engineering, 2017, 39, 228-236). In alternative embodiments, refactored lasso peptide biosynthetic gene clusters and/or genes are modified and combined for the biosynthesis of other lasso peptide analogs (combinatorial biosynthesis). In alternative embodiments, refactored gene clusters are added to a CFB reaction mixture with a cell extract as provided herein, and they can be added in the form of linear or circular DNA, e.g., plasmid or linear DNA.

[0301] In alternative embodiments, refactoring strategies comprise changes in a start codon, for example, for Streptomyces it might be beneficial to change the start codon, e.g., to TTG. For Streptomyces it has been shown that genes starting with TTG are better transcribed than genes starting with ATG or GTG (See: Myronovskyi et al., Applied and Environmental Microbiology, 2011; 77, 5370-5383).

[0302] In alternative embodiments, refactoring strategies comprise changes in ribosome binding sites (RBSs), and RBSs and their relationship to a promoter, e.g., promoter and RBS activity can be context dependent. For example, the rate of transcription can be decoupled from the contextual effect by using ribozyme-based insulators between the promoter and the RBS to create uniform 5′-UTR ends of mRNA, (See: Lou, et al., Nat. Biotechnol., 2012, 30, 1137-42.

[0303] In alternative embodiment, exemplary processes and protocols for the functional optimization of biosynthetic gene clusters by combinatorial design and assembly comprise methods described herein including next generation sequencing and identification of genes, genes clusters and networks, and gene recombineering or recombination-mediated genetic engineering (See: Smanski et al., Nat. Biotechnol., 2014, 32, 1241-1249).

[0304] In parallel, refactored linear DNA fragments can also be cloned into a suitable expression vector for transformation into a heterologous expression host or for use in CFB methods and processes, as provided herein. In alternative embodiments, provided are CFB methods and reactions comprising refactored gene clusters with single organism or mixed cell extracts.

[0305] In alternative embodiments, products of the CFB methods and processes, including CFB reaction mixtures, are subjected to a suite of “-omics” based approaches including: metabolomics, transcriptomics and proteomics, towards understanding the resulting proteome and metabolome, as well as the expression of lasso peptide biosynthetic genes and gene clusters. In alternative embodiments, lasso peptides produced within CFB reaction mixtures as provided herein are identified and characterized using a combination of high-throughput mass spectrometry (MS) detection tools as well as chemical and biological based assays. Following the characterization of the CFB produced lasso peptides, the corresponding biosynthetic genes and gene clusters may be cloned into a suitable vector for expression and scale up in a heterologous or native expression host. Production of lasso peptides can be scaled up in an in vitro bioreactor or using a fermentor involving a heterologous or native expression host.

[0306] In alternative embodiments, metagenomics, the analysis of DNA from a mixed population of organisms, is used to discover and identify biocatalysts, genes, and biosynthetic gene clusters, e.g., lasso peptide biosynthetic gene clusters. In alternative embodiments, metagenomics is used initially to involve the cloning of either total or enriched DNA directly from the environment (eDNA) into a host that can be easily cultivated (See: Handelsman, J., Microbiol. Mol. Biol. Rev., 2004, 68, 669-685). Next generation sequencing (NGS) technologies also can be used e.g., to allow isolated eDNA to be sequenced and analyzed directly from environmental samples (See: Shokralla, et al., Mol. Ecol. 2012, 21, 1794-1805).

[0307] As described herein the CFB methods and reaction mixtures can produce analogs of known compounds, for example lasso peptide analogs. Accordingly, CFB reaction mixture compositions can be used in the processes described herein that generate lasso peptide diversity. Methods provided herein include a cell free (in vitro)method for making, synthesizing or altering the structure of a lasso peptide or lasso peptide analog, or a library thereof, comprising using the CFB reaction mixture compositions and CFB methods described herein. The CFB methods can produce in the CFB reaction mixture at least two or more of the altered lasso peptides to create a library of altered lasso peptides; preferably the library is a lasso peptide analog library, prepared, synthesized or modified by a CFB method comprising use of the cell extracts or extract mixtures described herein or by using the processor method described herein. Also provided is a library of lasso peptides or lasso peptide analogs, or a combination thereof, prepared, synthesized or modified by a CFB method comprising a CFB reaction mixture that produces lasso peptides or lasso peptide analogs from a minimal set of lasso peptide biosynthesis components, as described herein or by using the process or method described herein.

[0308] In alternative embodiments, practicing the invention comprises use of any conventional technique commonly used in molecular biology, microbiology, and recombinant DNA, which are within the skill of the art. Such techniques are known to those of skill in the art and are described in numerous texts and reference works (See e.g., Sambrook et al., “Molecular Cloning: A Laboratory Manual,” Second Edition, Cold Spring Harbor, 1989; and Ausubel et al., “Current Protocols in Molecular Biology,” 1987). Unless defined otherwise herein, all technical and scientific terms used herein have the same meaning as commonly understood by one of ordinary skill in the art to which this invention pertains. For example, Singleton and Sainsbury, Dictionary of Microbiology and Molecular Biology, 2d Ed., John Wiley and Sons, N Y (1994); and Hale and Marham, The Harper Collins Dictionary of Biology, Harper Perennial, NY (1991) provides those of skill in the art with general dictionaries of many of the terms used in the invention. Although any methods and materials similar or equivalent to those described herein find use in the practice of the present invention, the preferred methods and materials are described herein. Accordingly, the terms defined immediately below are more fully described by reference to the Specification as a whole.

[0309] 5.10 Conjugation

[0310] In alternative embodiments, CFB methods and systems, including those involving in vitro, or cell-free, transcription/translation (TX-TL), are used to produce a lasso peptide or lasso peptide analog that is fused or conjugated to a second molecule or molecules, optionally a pharmaceutically acceptable carrier molecule, optionally a polymer, a protein or peptide, an antibody or fragment thereof, an affibody, a nanobody, a PEG or a PEG derivative, a lipophilic carrier including a fatty acid, optionally palmitoyl, myristoyl, stearic acid, 3-pentadecylglutaric acid, that associates with a serum protein such as albumin, LDL or HDL, and wherein optionally the carrier increases blood circulation time or cell-targeting or both for the lasso peptide or lasso peptide analog; and optionally the lasso peptide or lasso peptide analog is fused or conjugated to a second molecule or molecules in the cell extract, and optionally is enriched before being fused or conjugated to the second molecule or molecules, or is isolated before being fused or conjugated to the second molecule or molecules, and optionally the lasso peptide or lasso peptide analog is site-specifically fused or conjugated to the second molecule or molecules, optionally wherein the lasso peptide or lasso peptide analog is modified to comprise a group capable of the site-specific fusion or conjugation to the second molecule or molecules, optionally where the lasso peptide or lasso peptide analog is synthesized in the CFB reaction mixture to comprise the site-specific reactive group, and, optionally wherein the library contains a plurality of lasso peptides or lasso peptide analogs, each having a site-specific reactive group at a different location on the lasso peptide or lasso peptide analogs, and optionally the site-specific reactive group can react with a cysteine or lysine or serine or tyrosine or glutamic acid or aspartic acid or azide or alkyne or alkene on the second molecule or molecules.

[0311] In alternative embodiments, provided are methods and compositions comprising: a lasso peptide or lasso peptide analog, obtained from a library as provided herein, wherein optionally the composition further comprises, is formulated with, or is contained in: a liquid, a solvent, a solid, a powder, a bulking agent, a filler, a polymeric carrier or stabilizing agent, a liposome, a particle or a nanoparticle, a buffer, a carrier, a delivery vehicle, or an excipient, optionally a pharmaceutically acceptable excipient.

[0312] In alternative embodiments, a lasso peptide or lasso peptide analog is fused or conjugated to a second molecule, optionally a pharmaceutically acceptable carrier molecule, optionally a polymer, a protein or peptide, an antibody or fragment thereof, an affibody, a nanobody, a PEG or a PEG derivative, biotin, a lipophilic carrier including a fatty acid, optionally palmitoyl, myristoyl, steric acid, 3-pentadecylglutaric acid, that associates with a serum protein such as albumin, LDL or HDL, and wherein optionally the carrier increases blood circulation time or cell-targeting or both for the lasso peptide or lasso peptide analog. In alternative embodiments, the lasso peptide or lasso peptide analog is fused or conjugated to the second molecule or molecules in the cell extract, and optionally is enriched before being fused or conjugated to the second molecule or molecules, or is isolated before being fused or conjugated to the second molecule or molecules.

[0313] In alternative embodiments, a lasso peptide or lasso peptide analog is site-specifically fused or conjugated to the second molecule, optionally wherein the lasso peptide or lasso peptide analog is modified to comprise a group capable of the site-specific fusion or conjugation to the second molecule or molecules, optionally where the lasso peptide or lasso peptide analog is synthesized in the cell extract to comprise the site-specific reactive group, and optionally wherein the library contains a plurality of lasso peptides or lasso peptide analogs each having a site-specific reactive group at a different location on the lasso peptide or lasso peptide analog, and optionally the site-specific reactive group can react with a cysteine or lysine or seine or tyrosine or glutamic acid or aspartic acid or azide or alkyne or alkene on the second molecule or molecules.

[0314] In alternative embodiments, provided are in vitro methods for making, synthesizing or altering the structure of a lasso peptide or lasso peptide analog, or library thereof, comprising use of a CFB reaction mixture with a cell extract as provided herein, or by using a CFB method or system as provided herein. In alternative embodiments, at least two or more of the altered lasso peptides are synthesized to create a library of altered lasso peptide variants, and optionally the library is a lasso peptide analog library.

[0315] In alternative embodiments, provided are libraries of lasso peptide or lasso peptide analogs, or a combination thereof, prepared, synthesized or modified by a CFB method or system comprising use of a CFB reaction mixture with a cell extract as provided herein, or by using a CFB method or system as provided herein. In alternative embodiments, the method for preparing, synthesizing or modifying the lasso peptide or lasso peptide analogs, or the combination thereof, comprises using a CFB reaction mixture with a cell extract from an Escherichia or from an Actinomyces, optionally a Streptomyces.

[0316] In alternative embodiments of the libraries: the lasso peptides or lasso peptide analogs, are site-specifically fused or conjugated to a second molecule or molecules; optionally wherein the lasso peptides or lasso peptide analogs are modified to comprise a group capable of the site-specific fusion or conjugation to the second molecule or molecules, optionally where the lasso peptides or lasso peptide analogs are synthesized in the CFB reaction mixture containing a cell extract to comprise the site-specific reactive group, and optionally wherein the library contains a plurality of lasso peptides or lasso peptide analogs, each having a site-specific reactive group at a different location on the lasso peptides or lasso peptide analogs, and optionally the site-specific reactive group can react with a cysteine or lysine or serine or tyrosine or glutamic acid or aspartic acid or azide or alkyne or alkene on the second molecule or molecules.

[0317] In alternative embodiments, the invention provides a method or composition according to any embodiment of the invention, substantially as herein before described, or described herein, with reference to any one of the examples. In alternative embodiments, practicing the invention comprises use of any conventional technique commonly used in molecular biology, microbiology, and recombinant DNA, which are within the skill of the art. Such techniques are known to those of skill in the art and are described in numerous texts and reference works (See e.g., Green and Sambrook, “Molecular Cloning: A Laboratory Manual,” 4th Edition, Cold Spring Harbor, 2012; and Ausubel et al., “Current Protocols in Molecular Biology,” 1987). Unless defined otherwise herein, all technical and scientific terms used herein have the same meaning as commonly understood by one of ordinary skill in the art to which this invention pertains. For example, Singleton and Sainsbury, Dictionary of Microbiology and Molecular Biology, 2d Ed., John Wiley and Sons, N Y (1994); and Hale and Marham, The Harper Collins Dictionary of Biology, Harper Perennial, NY (1991) provides those of skill in the art with general dictionaries of many of the terms used in the invention. Although any methods and materials similar or equivalent to those described herein find use in the practice of the present invention, the preferred methods and materials are described herein. Accordingly, the terms defined below are more fully described by reference to the Specification as a whole.

### 6. EXAMPLES

[0318] Examples related to the present invention are described below. In most cases, alternative techniques can be used. The examples are intended to be illustrative and are not limiting or restrictive to the scope of the invention. For example, where lasso peptides or lasso peptide analogs are prepared following a protocol of a Scheme, it is understood that conditions may vary, for example, any of the solvents, reaction times, reagents, temperatures, supplements, work up conditions, or other reaction parameters may be varied.

### General Methods

[0319] All molecular biology and cell-free biosynthesis reactions were conducted using standard plates, vial, and flasks typically employed when working with biological molecules such as DNA, RNA and proteins. LC-MS/MS analyses (including Hi-Res analysis) were performed on an Agilent 6530 Accurate-Mass Q-TOF MS equipped with a dual electrospray ionization source and an Agilent 1260 LC system with diode array detector. MS and UV data were analyzed with Agilent MassHunter Qualitative Analysis version B.05.00. All MALDI-TOF analyses were performed using a Bruker UltrafleXtreme MALDI TOF/TOF mass spectrometer. Preparative HPLC was carried out using an Agilent 218 purification system (ChemStation software, Agilent) equipped with a ProStar 410 automatic injector, Agilent ProStar UV-Vis Dual Wavelength Detector, a 440-LC fraction collector and preparative HPLC column indicated below. Semi-preparative HPLC purifications were performed on an Agilent 1260 Series Instrument with a multiple wavelength detector and Phenomenex Luna 5 μm C8(2) 250×100 mm semi preparative column. Unless otherwise specified, all HPLC purifications utilized 10 mM aq. NH4HCO3/MeCN and all analytical LCMS methods included a 0.1% formic acid buffer. NMR data are acquired using a 600 MHz Bruker Avance III spectrometer with a 1.7 mm cryoprobe. All signals are reported in ppm with the internal DMSO-d6 signal at 2.50 ppm (¹H-NMR) or 39.52 ppm (¹³C-NMR). 1D data is reported as s=singlet, d=doublet, t=triplet, q=quadruplet, m=multiplet or unresolved, br=broad signal, coupling constant(s) in Hz.

[0320] To prepare cell extracts, E. coli BL21 Star(DE3) cells were grown in the minimum medium containing MM9 salts (13 g/L), calcium chloride (0.1 mM), magnesium sulfate (2 mM), trace elements (2 mM) and glucose (10 g/L), in a 10 L bioreactor (Satorius) to the mid-log growth phase. The grown cells were then harvested and pelleted. The crude cell extracts were prepared as described in Kay, J., et al., Met. Eng., 2015, 32, 133-142 and Sun, Z. Z., J. Vis. Exp. 2013, 79, e50762, doi:10.3791/50762. For calibration of additional magnesium, potassium and DTT levels, a green fluorescence protein (GFP) reporter was used to determine the additional amount of Mg-glutamate, K-glutamate, and DTT that were subsequently added to each batch of the crude cell extracts to prepare the optimized cell extracts for optimal transcription-translation activities. Prior to cell-free biosynthesis of lasso peptide, the optimized cell extracts were pre-mixed with buffer that contains ATP, GTP, TTP, CTP, amino acids, t-RNA, magnesium glutamate, potassium glutamate, potassium phosphate, and other salts, NAD+, NADPH, glucose, 500 uM IPTG and 3 mM DTT to achieve a desirable reaction volume. An exemplary cell extract comprises the ingredients, and optionally with the amounts, as set forth in the following Table X1.

TABLE Xl

| Ingredients | Concentration | |
|---|---|---|
| E. coli BL21 | 33% v/v | |
| Star(DE3) extracts | (10 mg/ml of protein or higher) | |
| Amino Acids | 1.5 mM each | |
| | (Leucine, 1.25 mM) | |
| HEPES | 50 | mM |
| ATP | 1.5 | mM |
| GTP | 1.5 | mM |
| CTP & UTP | 0.9 | mM |
| tRNA | 0.2 | mg/mL |
| CoA | 0.26 | mM |
| NAD+ | 0.33 | mM |
| cAMP | 0.75 | mM |
| Folinic acid | 0.068 | mM |
| spermidine | 1 | mM |
| pEG-8000 | 2% | |
| magnesium glutamate | 4-12 | mM |
| potassium glutamate | 8-160 | mM |
| potassium phosphate | 1-10 | mM |
| DTT | 0-5 | mM |
| NADPH | 1 | mM |
| maltodexttin | 35 | mM |
| IPTG (optional) | 0.5 | mM |
| pyruvate | 30 | mM |
| NADH | 1 | mM |

[0321] Affinity chromatography procedures are carried out according to the manufacturers' recommendations to isolate lasso peptides fused to an affinity tag; for examples, Strep-tag® II based affinity purification (Strep-Tactin® resin, IBA Lifesciences), His-tag-based affinity purification (Ni-NTA resin, ThermoFisher), maltose-binding protein based affinity purification (amylose resin, New England BioLabs). The sample of lasso peptides fused to an affinity tag is lyophilized and resuspended in a binding buffer with respect to its affinity tag according to the manufacturer's recommendation. The resuspended lasso peptide sample is directly applied to an immobilized matrix corresponding to its fused affinity tag (Tactin for Strep-tag® II, Ni-NTA for His-tag, or amylose resin for maltose binding protein) and incubated at 4° C. for an hour. The matrix is then washed with at least 40× volume of washing buffer and eluted with three successive 1× volume of elution buffer containing 2.5 mM desthiobiotin for Strep-Tactin® resin, 250 mM imidizole for Ni-NTA resin or 10 mM maltose for amylose resin. The eluted fractions are analyzed on a gradient (10-20%) Tris-Tricine SDS-PAGE gel (Mini-PROTEAN, BioRad) and then stained with Coomassie brilliant blue.

[0322] The purity of eluted lasso peptide was examined by LC-MSMS on an Agilent 6530 Accurate-Mass Q-TOF mass spectrometer. Where possible, MSMS fragmentation is used to further characterize lasso peptides based on the rule described in Fouque, K. J. D, et al., Analyst, 2018, 143, 1157-1170. If impurities are observed in chromatographic spectra, preparative chromatography is performed to further enrich the purity of lasso peptides.

### Analytical LCMS Analytical Method:

[0323] Column: Phenomenex Kinetex 2.6 XB-C18 100 A, 150×4.6 mm column.
Flow rate: 0.7 mL/min
Temperature: RTMobile Phase A: 0.1% formic acid in water
Mobile Phase B: 0.1% formic acid in acetonitrile
Injection amount: 2 □L
HPLC Gradient: 10% B for 3.0 min, then 10 to 100% B over 20 minutes follow by 100% B for 3 min. 4 minute post run equilibration time

[0324] Preparative HPLC was carried out using an Agilent 218 purification system (ChemStation software, Agilent) equipped with a ProStar 410 automatic injector, Agilent ProStar UV-Vis Dual Wavelength Detector, a 440-LC faction collector. Fractions containing lasso peptides were identified using the LCMS method described above, or by direct injection (bypassing the LC column in the above method) prior to combining and freeze-drying. Analytical LC/MS (see method above) was then performed on the combined and concentrated lasso peptides.

### Preparative HPLC Method:

[0325] Column: Phenomenex Luna® preparative column 5 μM, C8(2) 100 Å100×21.2 mm
Flow rate: 15 m/min

### Temperature: RT

[0326] Mobile Phase A: 10 mM aq. NH4HCO3
Mobile Phase B: acetonitrile
Injection amount: vanes
HPLC Gradient: 20-40% MeCN for 20 min, then 40-95% MeCN for 5 min

[0327] If necessary, semi-preparative HPLC purifications were performed on an Agilent 1260 Series Instrument with a multiple wavelength detector

[0328] Semipreparative HPLC Method:

[0329] Column: Phenomenex Luna®5 μm C18(2)250×100 mm

[0330] Flow rate: 4 m/min

[0331] Temperature: RT

[0332] Mobile Phase A: 10 mM aq. NH4HCO3

[0333] Mobile Phase B: acetonitrile

[0334] Injection amount: vanes

[0335] HPLC Gradient: 20-40% MeCN for 20 min, then 40-95% MeCN for 5 min

[0336] Monoisotopic masses were extrapolated from the lasso peptide charge envelop [(M+H)¹⁺, (M+2H)²⁺, (M+3H)³⁺] in the m/z 500-3,200 range using a Agilent 6530 Accurate-Mass Q-TOF MS equipped with a dual electrospray ionization source and an Agilent 1260 LC system using an internal reference (see analytical procedure described above). Both MS and MS/MS analyses were performed in positive-ion mode.

[0337] NMR samples are dissolved in DMSO-d6 (Cambridge Isotope Lab-oratories). All NMR experiments are run on a 600 MHz Bruker Avance III spectrometer with a 1.7 mm cryoprobe. All signals are reported in ppm with the internal DMSO-d6 signal at 2.50 ppm (H-NMR) or 39.52 ppm (¹³C-NMR). Where applicable, structural characterization of lasso peptide follow the methods described in the literatures listed below:
[0338] 1. Knappe et al., J. Am. Chem. Soc., 2008, 130 (34), 11446-11454
[0339] 2. Maksimov et al., PNAS, 2012, 109 (38), 15223-15228
[0340] 3. Tietz et al., Nature Chem. Bio., 2017, 13, 470-478
[0341] 4. Zheng and Price, Prog Nucl Magn Reson Spectrosc, 2010, 56 (3), 267-288
[0342] 5. Marion et al., J Magn Reson, 1989, 85 (2), 393-399
[0343] 6. Davis et al., J Magn Reson, 1991, 94 (3), 637-644
[0344] 7. Rucker and Shaka, Mol Phys, 1989, 68 (2), 509-517
[0345] 8. Hwang and Shaka, J Magn Reson A, 1995, 112 (2), 275-27

[0346] Table X2 below lists examples of lasso peptides produced with cell-free biosynthesis using a minimum set of genes.

TABLE X2
minimum set of genes required for cell-free biosynthesis of lasso peptides

| | | Precursor | Peptidase | Cyclase | Cyclase- | RRE | RRE- |
|---|---|---|---|---|---|---|---|
| Lasso | Molecular | peptide | peptide | peptide | RRE | peptide | peptidase |
| peptide | mass | No: | No: | No: | peptide No: | No: | peptide No: |
| microcin J25 | 2107 | 92 | 1492 | 2571 | — | — | — |
| ukn22 | 2269 | 525 | 1584 | 2676 | — | 3975 | — |
| capistruin | 2049 | 15 | 1566 | 3438 | — | — | — |
| lariatin | 2204 | 162 | 1368 | 2406 | — | 3803 | — |
| ukn16 | 2306 | 823 | 1442 | — | 2504 | — | — |
| adanomysin | 1676 | 839 | — | 3128 | — | — | 4150 |
| burhizin | 1848 | 111 | 2033 | 2722 | — | — | — |
| cellulonodin | 2277 | 2645 | 2647 | 2649 | — | 2651 | — |

[0347] Table X3 below lists the amino acid sequence of ukn22 lasso peptide and ukn22 lasso peptide variants produced with cell-free biosynthesis.

TABLE X3
amino acid sequence of ukn22
lasso peptide and ukn22 lasso
peptide variants

| | | Amino acid |
|---|---|---|
| | | sequence of |
| Lasso | Molecular | the core |
| peptide | mass | lasso peptide |
| ukn22 | 2269 | WYTAEWGLELIFVFPRFI |
| | | (SEQ ID NO: 2632) |
| ukn22 W1Y | 2246 | YYTAEWGLELIFVFPRFI |
| | | (SEQ ID NO: 2638) |
| ukn22 W1F | 2230 | FYTAEWGLELIFVFPRFI |
| | | (SEQ ID NO: 2639) |
| ukn22 W1H | 2220 | HYTAEWGLELIFVFPRFI |
| | | (SEQ ID NO: 2640) |
| ukn22 W1L | 2196 | LYTAEWGLELIFVFPRFI |
| | | (SEQ ID NO: 2641) |
| ukn22 W1A | 2154 | AYTAEWGLELIFVFPRFI |
| | | (SEQ ID NO: 2642) |

### Example 1

[0348] This study demonstrates synthesis of microcin J25 (MccJ25) lasso peptide GGAGHVPEYFVGIGTPISFYG (the lasso peptide of peptide No: 92) (SEQ ID NO: 2631) where the N-terminal amine group of a glycine (G) residue at the first position was cyclized with the side-chain carboxylic acid group of a glutamic acid (E) residue at the eighth position

[0349] DNA encoding the sequences for the MccJ25 precursor peptide (peptide No: 92), peptidase (peptide No: 1492), and cyclase (peptide No: 2571) from Escherichia coli were synthesized (Thermo Fisher, Carlsbad, Calif.) and individually cloned into a pZE expression vector behind a T7 promoter (Expressys). The resulting plasmids encoding genes for the MccJ25 precursor peptide (peptide No: 92) without a C-terminal affinity tag, peptidase (peptide No: 1492) with a C-terminal Strep-tag®, and cyclase (peptide No: 2571) also with a C-terminal Strep-tag® were used for subsequent cell-free biosynthesis. The MccJ25 precursor peptide (peptide No: 92) was produced using the PURE system (New England BioLabs) according to the manufacturer's recommended protocol. The peptidase (peptide No: 1492) and cyclase (peptide No: 2571) were expressed in Escherichia coli as described by Yan et al., Chembiochem. 2012, 13(7):1046-52 (doi: 10.1002/cbic.201200016) and purified using Tactin resin (IBA Lifesciences) according to the manufacturer's recommendation. Production of MccJ25 lasso peptide was initiated by adding 5 μL of the PURE reaction containing the MccJ25 precursor peptide (peptide No: 92), and 10 μL of purified peptidase (peptide No: 1492), and 20 μL of purified cyclase (peptide No: 2571) in buffer that contains 50 mM Tris (pH8), 5 mM MgCl2, 2 mM DTT and 1 mM ATP to achieve a total volume of 50 μL. The cell-free biosynthesis of MccJ25 lasso peptide was accomplished by incubating the reaction for 3 hours at 30° C. The reaction sample was subsequently diluted in MeOH at 1:1 ratio (v/v) and thoroughly mixed at room temperature for 30 minutes, followed by centrifugation at 14,000 rpm in an Eppendorf benchtop centrifuge to remove precipitated protein. The resulting liquid fraction was subjected to LC/MS analysis on an Applied Biosystems 3200 APCI triple quadrupole mass spectrometer for lasso peptide detection. The molecular mass of 2107.02 m/z corresponding to MccJ25 lasso peptide (GGAGHVPEYFVGIGTPISFYG (SEQ ID NO: 2631) minus H₂O) was observed and compared to an authentic sample (Std) of MccJ25 (FIG. 6).

### Example 2

[0350] This study demonstrates synthesis of ukn22 lasso peptide WYTAEWGLELIFVFPRFI (the lasso peptide of peptide No: 525) (SEQ ID NO: 2632) where the N-terminal amine group of a tryptophan (W) residue at the first position was cyclized with the side-chain carboxylic acid group of a glutamic acid (E) residue at the ninth position.

[0351] DNA encoding the sequences for the ukn22 precursor peptide (peptide No: 525), peptidase (peptide No: 1584), cyclase (peptide No: 2676) and RRE (peptide No: 3975) from Thermobifida fusca were used. Each of the DNA sequences was cloned into a pET28 plasmid vector behind a maltose binding protein (MBP) sequence to create an N-terminal MBP fusion protein. The resulting plasmids encoding fusion genes for the MBP-ukn22 precursor peptide (peptide No: 525), MBP-peptidase (peptide No: 1584), MBP-cyclase (peptide No: 2676) and MBP-RRE (peptide No: 3975) were driven by an IPTG-inducible T7 promoter. Production of ukn22 lasso peptide was initiated by adding the plasmid vectors encoding MBP-ukn22 precursor peptide (peptide No: 525), MBP-peptidase (peptide No: 1584), MBP-cyclase (peptide No: 2676) and MBP-RRE (peptide No: 3975) (20 nM each) to the optimized E. coli BL21 Star(DE3) cell extracts, which were pre-mixed with buffer as described earlier to achieve a total volume of 50 μL. The cell-free biosynthesis of ukn22 lasso peptide was accomplished by incubating the reaction for 16 hours at 22° C. The reaction sample was subsequently diluted in MeOH at 1:1 ratio (v/v) and thoroughly mixed at room temperature for 30 minutes, followed by centrifugation at 14,000 rpm in an Eppendorf benchtop centrifuge to remove precipitated protein. The resulting liquid faction was subjected to LC/MS analysis on an Applied Biosystems 3200 APCI triple quadrupole mass spectrometer for lasso peptide detection. The molecular mass of 2269.18 m/z corresponding to ukn22 lasso peptide (WYTAEWGLELIFVFPRFI (SEQ ID NO: 2632) minus H₂O) was observed (FIG. 7).

### Example 3

[0352] Synthesis of capistruin lasso peptide GTPGFQTPDARVISRFGFN (SEQ ID NO: 2633) (the lasso peptide of peptide No: 15) by adding the individually cloned genes for the capistruin precursor peptide (peptide No: 15), peptidase (peptide No: 1566) and cyclase (peptide No: 3438) where the N-terminal amine group of a glycine (G) residue at the first position is cyclized with the side-chain carboxylic acid group of an aspartic acid (D) residue at the ninth position.

[0353] Codon-optimized DNA encoding the sequences for the capistruin precursor peptide (peptide No: 15), peptidase (peptide No: 1566) and cyclase (peptide No: 3438) from Burkholderia thailandensis are synthesized (Thermo Fisher, Carlsbad, Calif.) and individually cloned into a pZE expression vector behind a T7 promoter (Expressys). The resulting plasmids encoding genes for the capistruin precursor peptide (peptide No: 15), peptidase (peptide No: 1566) and cyclase (peptide No: 3438) are used with or without a C-terminal affinity tag. Production of capistruin lasso peptide is initiated by adding the plasmid encoding the capistruin precursor peptide (peptide No: 15), peptidase (peptide No: 1566) and cyclase (peptide No: 3438) (15 nM each) to the optimized E. coli BL21 Star(DE3) cell extracts, which are pre-mixed with buffer that contains ATP, GTP, TTP, CTP, amino acids, t-RNA, magnesium glutamate, potassium glutamate, potassium phosphate, and other salts, NAD+, NADPH, and glucose to achieve a total volume of 400 μL. The cell-free biosynthesis of capistruin lasso peptide is accomplished by incubating the reaction for 18 hours at 22° C. The reaction sample is subsequently diluted in MeOH at 1:1 ratio (v/v) and thoroughly mixed at room temperature for 30 minutes, followed by centrifugation at 14,000 rpm in an Eppendorf benchtop centrifuge to remove precipitated protein. The resulting liquid fraction is subjected to LC/MS analysis on an Agilent 6530 Accurate-Mass Q-TOF MS equipped with a dual electrospray ionization source and an Agilent 1260 LC system with diode array detector for lasso peptide detection. The molecular mass of 2049 m/z corresponding to capistruin lasso peptide (GTPGFQTPDARVISRFGFN (SEQ ID NO: 2633) minus H₂O) is observed. The collected lasso peptide sample is further purified by affinity chromatography and/or preparative HPLC, followed by high resolution mass spectrometry and NMR for structural characterization.

### Example 4

[0354] Synthesis of lariatin lasso peptide GSQLVYREWVGHSNVIKPGP (SEQ ID NO: 2634) (the lasso peptide of peptide No: 162) where the N-terminal amine group of a glycine (G) residue at the first position is cyclized with the side-chain carboxylic acid group of a glutamic acid (E) residue at the eighth position

[0355] Codon-optimized DNA encoding the sequences for the lariatin precursor peptide (peptide No: 162), peptidase (peptide No: 1368), cyclase (peptide No: 2406) and RRE (peptide No: 3803) from Rhodococcus jostii are synthesized (Thermo Fisher, Carlsbad, Calif.) and individually cloned into a pZE expression vector behind a T7 promoter (Expressys). The resulting plasmids encoding genes for the lariatin precursor peptide (peptide No: 162), peptidase (peptide No: 1368), cyclase (peptide No: 2406) and RRE (peptide No: 3803) are used with or without a C-terminal affinity tag. Production of lariatin lasso peptide is initiated by adding the plasmids encoding the lariatin precursor peptide (peptide No: 162), peptidase (peptide No: 1368), cyclase (peptide No: 2406) and RRE (peptide No: 3803) (15 nM each) to the optimized E. coli BL21 Star(DE3) cell extracts, which are pre-mixed with buffer that contains ATP, GTP, TTP, CTP, amino acids, t-RNA, magnesium glutamate, potassium glutamate, potassium phosphate, and other salts, NAD+, NADPH, and glucose to achieve a total volume of 400 μL. The cell-free biosynthesis of lariatin lasso peptide is accomplished by incubating the reaction for 18 hours at 22° C. The reaction sample is subsequently diluted in MeOH at 1:1 ratio (v/v) and thoroughly mixed at room temperature for 30 minutes, followed by centrifugation at 14,000 rpm in an Eppendorf benchtop centrifuge to remove precipitated protein. The resulting liquid faction is subjected to LC/MS analysis on an Agilent 6530 Accurate-Mass Q-TOF MS equipped with a dual electrospray ionization source and an Agilent 1260 LC system with diode array detector for lasso peptide detection. The molecular mass of 2204 m/z corresponding to lariatin lasso peptide (GSQLVYREWVGHSNVIKPGP (SEQ ID NO: 2634) minus H₂O) is observed. The collected lasso peptide sample is further purified by affinity chromatography and/or preparative HPLC, followed by high resolution mass spectrometry and NMR for structural characterization.

### Example 5

[0356] Synthesis of ukn16 lasso peptide GVWFGNYVDVGGAKAPFPWGSN (SEQ ID NO: 2635)(the lasso peptide of peptide No: 823) where the N-terminal amine group of a glycine (G) residue at the first position is cyclized with the side-chain carboxylic acid group of an aspartic acid (D) residue at the ninth position

[0357] Codon-optimized DNA encoding the sequences for the ukn16 precursor peptide (peptide No: 823), peptidase (peptide No: 1442), and cyclase-RRE fusion protein (peptide No: 2504) from Bifidobacterium reuteri DSM 23975 are synthesized (Thermo Fisher, Carlsbad, Calif.) and individually cloned into a pZE expression vector behind a T7 promoter (Expressys). The resulting plasmids encoding genes for the ukn16 precursor peptide (peptide No: 823), peptidase (peptide No: 1442), and cyclase-RRE fusion protein (peptide No: 2504) are used with or without a C-terminal affinity tag. Production of ukn16 lasso peptide is initiated by adding the plasmids encoding the ukn16 precursor peptide (peptide No: 823), peptidase (peptide No: 1442), and cyclase-RRE fusion protein (peptide No: 2504) (15 nM each) to the optimized E. coli BL21 Star(DE3) cell extracts, which are pre-mixed with buffer that contains ATP, GTP, TTP, CTP, amino acids, t-RNA, magnesium glutamate, potassium glutamate, potassium phosphate, and other salts, NAD+, NADPH and glucose to achieve a total volume of 400 μL. The cell-free biosynthesis of ukn16 lasso peptide is accomplished by incubating the reaction for 18 hours at 22° C. The reaction sample is subsequently diluted in MeOH at 1:1 ratio (v/v) and thoroughly mixed at room temperature for 30 minutes, followed by centrifugation at 14,000 rpm in an Eppendorf benchtop centrifuge to remove precipitated protein. The resulting liquid faction is subjected to LC/MS analysis on an Agilent 6530 Accurate-Mass Q-TOF MS equipped with a dual electrospray ionization source and an Agilent 1260 LC system with diode array detector for lasso peptide detection. The molecular mass of 2306 m/z corresponding to ukn16 lasso peptide (GVWFGNYVDVGGAKAPFPWGSN (SEQ ID NO: 2635) minus H₂O) is observed. The collected lasso peptide sample is further purified by affinity chromatography and/or preparative HPLC, followed by high resolution mass spectrometry and NMR for structural characterization.

### Example 6

[0358] Synthesis of adanomysin lasso peptide GSSTSGTADANSQYYW (the lasso peptide of peptide No: 839) (SEQ ID NO: 2636) where the N-terminal amine group of a glycine (G) residue at the first position is cyclized with the side-chain carboxylic acid group of an aspartic acid (D) residue at the ninth position

[0359] Codon-optimized DNA encoding the sequences for the adanomysin precursor peptide (peptide No: 839), cyclase (peptide No: 3128), and RRE-peptidase fusion protein (peptide No: 4150) from Streptomyces niveus are synthesized (Thermo Fisher, Carlsbad, Calif.) and individually cloned into a pZE expression vector behind a T7 promoter (Expressys). The resulting plasmids encoding genes for the adanomysin precursor peptide (peptide No: 839), cyclase (peptide No: 3128), and RRE-peptidase fusion protein (peptide No: 4150) are used with or without a C-terminal affinity tag. Production of adanomysin lasso peptide is initiated by adding the plasmids encoding the adanomysin precursor peptide (peptide No: 839), cyclase (peptide No: 3128), and RRE-peptidase fusion protein (peptide No: 4150) (15 nM each) to the optimized E. coli BL21 Star(DE3) cell extracts, which are pre-mixed with buffer that contains ATP, GTP, TTP, CTP, amino acids, t-RNA, magnesium glutamate, potassium glutamate, potassium phosphate, and other salts, NAD+, NADPH, and glucose to achieve a total volume of 400 μL. The cell-free biosynthesis of adanomysin lasso peptide is accomplished by incubating the reaction for 18 hours at 22° C. The reaction sample is subsequently diluted in MeOH at 1:1 ratio (v/v) and thoroughly mixed at room temperature for 30 minutes, followed by centrifugation at 14,000 rpm in an Eppendorf benchtop centrifuge to remove precipitated protein. The resulting liquid faction is subjected to LC/MS analysis on an Agilent 6530 Accurate-Mass Q-TOF MS equipped with a dual electrospray ionization source and an Agilent 1260 LC system with diode array detector for lasso peptide detection. The molecular mass of 1676 m/z corresponding to adanomysin lasso peptide (GSSTSGTADANSQYYW (SEQ ID NO: 2636) minus H₂O) is observed. The collected lasso peptide sample is further purified by affinity chromatography and/or preparative HPLC, followed by high resolution mass spectrometry and NMR for structural characterization.

### Example 7

[0360] Synthesis of ukn22 lasso peptide WYTAEWGLELIFVFPRFI (SEQ ID NO: 2632)(the lasso peptide of peptide No: 525) where the N-terminal amine group of a tryptophan (W) residue at the first position is cyclized with the side-chain carboxylic acid group of a glutamic acid (E) residue at the ninth position

[0361] Codon-optimized DNA encoding the sequences for the ukn22 precursor peptide (peptide No: 525), peptidase (peptide No: 1584), cyclase (peptide No: 2676) and RRE (peptide No: 3975) from Thermobifida fusca are synthesized (Thermo Fisher, Carlsbad, Calif.) and individually cloned into a pZE expression vector (Expressys) behind a maltose binding protein (MBP) sequence to create an N-terminal MBP fusion protein. The resulting plasmids encoding fusion genes for the MBP-ukn22 precursor peptide (peptide No: 525), MBP-peptidase (peptide No: 1584), MBP-cyclase (peptide No: 2676) and MBP-RRE (peptide No: 3975) are driven by a constitutive T7 promoter. The MBP fusion proteins are produced either separately in individual vessels or in combination in one single vessel by introducing DNA plasmid vectors into the vessel containing E. coli BL21 Star(DE3) cell extracts (15 mg/mL total protein) which is pre-mixed with the buffer described above to achieve a total volume of 50 μL. The MBP fusion proteins are then purified using amylose resin (New England BioLabs) according to the manufacturer's recommendation. The cell-free biosynthesis of ukn22 lasso peptide is accomplished by incubating the isolated MBP fusion proteins for 16 hours at 22° C. The reaction sample is subsequently diluted in MeOH at 1:1 ratio (v/v) and thoroughly mixed at room temperature for 30 minutes, followed by centrifugation at 14,000 rpm in an Eppendorf benchtop centrifuge to remove precipitated protein. The resulting liquid faction is subjected to LC/MS analysis on an Agilent 6530 Accurate-Mass Q-TOF MS equipped with a dual electrospray ionization source and an Agilent 1260 LC system with diode array detector for lasso peptide detection. The molecular mass of 2269 m/z corresponding to ukn22 lasso peptide (WYTAEWGLELIFVFPRFI (SEQ ID NO: 2632) minus H₂O) is observed. The collected lasso peptide sample is further purified by affinity chromatography and/or preparative HPLC, followed by high resolution mass spectrometry and NMR for structural characterization.

### Example 8 Screening of Lariatin Lasso Peptide Against G Protein-Couple Receptors (GPCRs)

[0362] Isolated lariatin lasso peptide is lyophilized and reconstituted in 100% DMSO to achieve 10 mM stock. Screening of lariatin lasso peptide against a panel of G protein-couple receptors (GPCRs) follows the manufacturer's recommendation (PathHunter® β-Arrestin eXpress GPCR Assay, Eurofins DiscoverX). The screen is performed at both “agonist” and “antagonist” modes if a known nature ligand is available, and only at “agonist” mode if no known ligand is available. The effect of lariatin lasso peptide on the selected GPCRs is measured by β-Arrestin recruitment using a technology developed by Eurofins DiscoverX called Enzyme Fragment Complementation (EFC) with β-galactosidase (β-Gal) as the functional reporter. PathHunter GPCR cells are expanded from freezer stocks according to the manufacture's procedures. Cells are seeded in a total volume of 20 μL into white walled, 384-well microplates and incubated at 37° C. for the appropriate time prior to testing. For agonist determination, cells are incubated with sample to induce response. Intermediate dilution of sample stocks is performed to generate 5× sample in assay buffer. Five microliters of 5× sample is added to cells and incubated at 37° C. or room temperature for 90 to 180 minutes. Vehicle (DMSO) concentration is 1%. For inverse agonist determination, cells are incubated with sample to induce response. Intermediate dilution of sample stocks is performed to generate 5× sample in assay buffer. Five microliters of 5× sample is added to cells and incubated at 37° C. or room temperature for 3 to 4 hours. Vehicle (DMSO) concentration is 1%. Extended incubation is typically required to observe an inverse agonist response in the PathHunter arrestin assay. For antagonist determination, cells are preincubated with antagonist followed by agonist challenge at the EC80 concentration. Intermediate dilution of sample stocks is performed to generate 5× sample in assay buffer. Five microliters of 5× sample is added to cells and incubated at 37° C. or room temperature for 30 minutes. Vehicle (DMSO) concentration is 1%. Five microliters of 6× EC80 agonist in assay buffer is added to the cells and incubated at 37° C. or room temperature for 90 or 180 minutes. After appropriate compound incubation, assay signal is generated through a single addition of 12.5 μL (50% v/v) of PathHunter Detection reagent cocktail for agonist and inverse agonist assays, followed by a one-hour incubation at room temperature. For some GPCRs that exhibit low basal signal, activity is detected using a high sensitivity detection reagent (PathHunter Flash Kit) to improve assay performance. For these assays an equal volume (25 μL) of detection reagent is added to the wells and incubated for one hour at room temperature. Microplates are read following signal generation with a PerkinElmer Envision™ instrument for chemiluminescent signal detection.

### Example 9 Creation of a Lasso Peptide Library

[0363] To create a library of lasso peptides, codon-optimized DNA encoding the sequences described above for capistruin precursor peptide (peptide No: 15), capistruin peptidase (peptide No: 1566), capistruin cyclase (peptide No: 3438), lariatin precursor peptide (peptide No: 162), lariatin peptidase (peptide No: 1368), lariatin cyclase (peptide No: 2406), lariatin RRE (peptide No: 3803), ukn16 precursor peptide (peptide No: 823), ukn16 peptidase (peptide No: 1442), ukn16 cyclase-RRE fusion protein (peptide No: 2504), adanomysin precursor peptide (peptide No: 839), adanomysin cyclase (peptide No: 3128), and adanomysin RRE-peptidase fusion protein (peptide No: 4150) are synthesized (Thermo Fisher, Carlsbad, Calif.) and individually cloned into a pZE expression vector behind a T7 promoter (Expressys). The resulting plasmids encode genes for biosynthesis of capistruin, lariatin, ukn16 and adanomysin with or without a C-terminal affinity tag. Production of the fours lasso peptides in one single vessel is initiated by adding all the plasmids (15 nM each) to the optimized E. coli BL21 Star(DE3) cell extracts, which are pre-mixed with buffer that contains ATP, GTP, TTP, CTP, amino acids, t-RNA, magnesium glutamate, potassium glutamate, potassium phosphate, and other salts, NAD+, NADPH, and glucose to achieve a total volume of 400 μL. The cell-free biosynthesis of the four lasso peptides are accomplished by incubating the reaction for 18 hours at 22° C. The reaction sample is subsequently diluted in MeOH at 1:1 ratio (v/v) and thoroughly mixed at room temperature for 30 minutes, followed by centrifugation at 14,000 rpm in an Eppendorf benchtop centrifuge to remove precipitated protein. The resulting liquid fraction is subjected to LC/MS analysis on an Agilent 6530 Accurate-Mass Q-TOF MS equipped with a dual electrospray ionization source and an Agilent 1260 LC system with diode array detector for lasso peptide detection. The molecular mass of 2049 m/z corresponding to capistruin lasso peptide (GTPGFQTPDARVISRFGFN (SEQ ID NO: 2633) minus H₂O), the molecular mass of 2204 m/z corresponding to lariatin lasso peptide (GSQLVYREWVGHSNVIKPGP (SEQ ID NO: 2634) minus H₂O), the molecular mass of 2306 m/z corresponding to ukn16 lasso peptide (GVWFGNYVDVGGAKAPFPWGSN (SEQ ID NO: 2635) minus H₂O), and the molecular mass of 1676 m/z corresponding to adanomysin lasso peptide (GSSTSGTADANSQYYW (SEQ ID NO: 2636) minus H₂O) are observed. The collected lasso peptide sample is further purified by affinity chromatography and/or preparative HPLC, followed by high resolution mass spectrometry and NMR for structural characterization.

### Example 10 Evolution of Lariatin Lasso Peptide Via Site-Saturation Mutagenesis

[0364] Codon-optimized DNA encoding the sequences for the lariatin precursor peptide (peptide No: 162), peptidase (peptide No: 1368), cyclase (peptide No: 2406) and RRE (peptide No: 3803) from Rhodococcus jostii are synthesized (Thermo Fisher, Carlsbad, Calif.) and individually cloned into a pZE expression vector behind a T7 promoter (Expressys). The resulting plasmids encoding genes for the lariatin precursor peptide (peptide No: 162), peptidase (peptide No: 1368), cyclase (peptide No: 2406) and RRE (peptide No: 3803) are used with or without a C-terminal affinity tag. To generation a site-saturation library of lariatin lasso peptide variants, each amino acid codon of lanatin core peptide GSQLVYREWVGHSNVIKPGP (SEQ ID NO: 2634) is mutagenized to non-parental amino acid codons with the exception of the glycine (G) residue at the first position and the glutamic acid (E) at the eighth position that are required for cyclization. The site-saturation mutagenesis is performed using QuikChange Lightning Site-Directed Mutagenesis kit (Agilent Technologies, CA) following the manufacturer's recommended protocol. The mutagenic oligonucleotide primers are synthesized (Integrated DNA Technologies, IL) and used either individually to incorporate a non-parental codon into the lanatin core peptide in a single vessel or in combination to incorporate more than one non-parental codons (e.g., NNK) into the lariatin core peptide in a single vessel. To create combinatorial mutation variants of lariatin lasso peptide during a lasso peptide evolution cycle, the mutagenic oligonucleotide primers are synthesized (Integrated DNA Technologies, IL) to simultaneously incorporate more than one codon changes.

[0365] Production of a lariatin lasso peptide variant is initiated by adding the plasmids encoding a mutated lanatin precursor peptide (variant of peptide No: 162), lariatin peptidase (peptide No: 1368), lariatin cyclase (peptide No: 2406) and lanatin RRE (peptide No: 3803) (15 nM each) in a single vessel containing the optimized E. coli BL21 Star(DE3) cell extracts, which are pre-mixed with buffer that contains ATP, GTP, TIP, CTP, amino acids, t-RNA, magnesium glutamate, potassium glutamate, potassium phosphate, and other salts, NAD+, NADPH, and glucose to achieve a total volume of 400 μL. The cell-free biosynthesis of a lariatin lasso peptide variant is accomplished by incubating the reaction for 18 hours at 22° C. The reaction sample is subsequently diluted in MeOH at 1:1 ratio (v/v) and thoroughly mixed at room temperature for 30 minutes, followed by centrifugation at 14,000 rpm in an Eppendorf benchtop centrifuge to remove precipitated protein. The resulting liquid fraction is subjected to LC/MS analysis on an Agilent 6530 Accurate-Mass Q-TOF MS equipped with a dual electrospray ionization source and an Agilent 1260 LC system with diode array detector for lasso peptide detection. The molecular mass corresponding to the lariatin lasso peptide variant (linear core peptide sequence minus H₂O) is observed. The collected lasso peptide sample is further purified by affinity chromatography and/or preparative HPLC, followed by high resolution mass spectrometry and NMR for structural characterization.

### Example 11

[0366] This study demonstrates cell-free biosynthesis of a three-member lasso peptide library in individual vessels. The library members comprised capsitruin (the lasso peptide of peptide No: 15 (SEQ ID NO: 2633)), ukn22 (the lasso peptide of peptide No: 525 (SEQ ID NO: 2632)) and burhizin (the lasso peptide of peptide No: 111) GGAGQYKEVEAGRWSDR (SEQ ID NO: 2643) (FIG. 8). Synthesis of capsitruin (SEQ ID NO: 2633) and burhizin (SEQ ID NO: 2643) was achieved by adding the corresponding BGC DNA sequences into the individual vessels.

[0367] The biosynthetic gene cluster (BGC) DNA sequence from Burkholderia thailandensis containing the open reading frames (ORFs) for a capistruin lasso precursor peptide (peptide No: 15), capistruin peptidase (peptide No: 1566) and capistruin cyclase (peptide No: 3438) was cloned into a pET41a plasmid vector. Similarly, the BGC DNA sequence from Burkholderia rhizoxinica containing the ORFs for a burhizin lasso precursor peptide (peptide No: 111), burhizin peptidase (peptide No: 2033) and burhizin cyclase (peptide No: 2722) was cloned into a second pET41a plasmid vector. Following the procedure described in Example 2, the four DNA plasmid vectors for biosynthesis of ukn22 were constructed to produce the MBP-ukn22 precursor peptide (peptide No: 525), MBP-peptidase (peptide No: 1584), MBP-cyclase (peptide No: 2676) and MBP-RRE (peptide No: 3975). The identity of all cloned DNA sequences was verified by Sanger DNA sequencing. High purity DNA plasmid vectors were prepared by Qiagen Plasmid Maxi Kit. Production of these three lasso peptides was initiated in individual vessels by adding the capistruin BGC plasmid vector into the first vessel, the burhizin BGC plasmid vector into the second vessel, and the four ukn22 plasmid vectors into the third vessel. Each of the three vessels contained the optimized E. coli BL21 Star(DE3) cell extracts, which were pre-mixed with buffer that contained ATP, GTP, TTP, CTP, amino acids, t-RNA, magnesium glutamate, potassium glutamate, potassium phosphate, and other salts, NAD+, NADPH, and glucose to achieve a total volume of 40 μL. The concentration of the DNA plasmid vectors was 20 nM for the capistruin BGC plasmid vector in the first vessel, 40 nM for the burhizin BGC plasmid vector in the second vessel and 10 nM each for the four ukn22 plasmid vectors in the third vessel. The cell-free biosynthesis of the lasso peptides was accomplished by incubating the reaction for 18 hours at 25° C. Each reaction sample was subsequently desalted, concentrated and purified with ZipTip® pipette tips (MilliporeSigma ZipTip®) and subjected to MALDI-TOF analysis on a Bruker UltrafleXtreme MALDI TOF/TOF mass spectrometer. The molecular mass corresponding to capsitruin (the linear core peptide of peptide No: 15 (SEQ ID NO: 2633) minus H₂O), ukn22 (the linear core peptide of peptide No: 525 (SEQ ID NO: 2632) minus H₂O) and burhizin (the linear core peptide of peptide No: 111 (SEQ ID NO: 2643) minus H₂O) was observed (FIG. 8).

### Example 12

[0368] This study demonstrates cell-free biosynthesis of a three-member lasso peptide library in a single vessel. The library members comprised capsitruin (the lasso peptide of peptide No: 15 (SEQ ID NO: 2633)), ukn22 (the lasso peptide of peptide No: 525 (SEQ ID NO: 2632)) and burhizin (the lasso peptide of peptide No: 111 (SEQ ID NO: 2643)) (FIG. 9). Synthesis of capsitruin (SEQ ID NO: 2633) and burhizin (SEQ ID NO: 2643) was achieved by adding the corresponding BGC DNA sequences into the single vessel.

[0369] The biosynthetic gene cluster (BGC) DNA sequence from Burkholderia thailandensis containing the open reading frames (ORFs) for a capistruin lasso precursor peptide (peptide No: 15), capistruin peptidase (peptide No: 1566) and capistruin cyclase (peptide No: 3438) was cloned into a pET41a plasmid vector. Similarly, the BGC DNA sequence from Burkholderia rhizoxinica containing the ORFs for a burhizin lasso precursor peptide (peptide No: 111), burhizin peptidase (peptide No: 2033) and burhizin cyclase (peptide No: 2722) was cloned into a second pET41a plasmid vector. Following the procedure described in Example 2, the four DNA plasmid vectors for biosynthesis of ukn22 were constructed to produce the MBP-ukn22 precursor peptide (peptide No: 525), MBP-peptidase (peptide No: 1584), MBP-cyclase (peptide No: 2676) and MBP-RRE (peptide No: 3975). The identity of all cloned DNA sequences was verified by Sanger DNA sequencing. High purity DNA plasmid vectors were prepared by Qiagen Plasmid Maxi Kit. Production of these three lasso peptides was initiated in a single vessel by adding the capistruin and burhizin BGC plasmid vectors and the four ukn22 plasmid vectors into the vessel. The single vessel contained the optimized E. coli BL21 Star(DE3) cell extracts, which were pre-mixed with buffer that contained ATP, GTP, TIP, CTP, amino acids, t-RNA, magnesium glutamate, potassium glutamate, potassium phosphate, and other salts, NAD+, NADPH, and glucose to achieve a total volume of 40 μL. The concentration of the DNA plasmid vectors in the single vessel was 20 nM for the capistruin BGC plasmid vector, 10 nM for the burhizin BGC plasmid vector and 5 nM each for the four ukn22 plasmid vectors. The cell-free biosynthesis of the lasso peptides was accomplished by incubating the reaction for 18 hours at 25° C. The reaction sample was subsequently desalted, concentrated and purified with ZipTip® pipette tips (MilliporeSigma ZipTip®) and subjected to MALDI-TOF analysis on a Bruker UltrafleXtreme MALDI TOF/TOF mass spectrometer. The molecular mass corresponding to capsitruin (the linear core peptide of peptide No: 15 (SEQ ID NO: 2633) minus H₂O), ukn22 (the linear core peptide of peptide No: 525 (SEQ ID NO: 2632) minus H₂O) and burhizin (the linear core peptide of peptide No: 111 (SEQ ID NO: 2643) minus H₂O) was observed (FIG. 9).

### Example 13

[0370] This study demonstrates cell-free biosynthesis of a six-member lasso peptide library in individual vessels. The library members comprised ukn22 lasso peptide (the lasso peptide of peptide No: 525 (SEQ ID NO: 2632)) and the five variants of ukn22 lasso peptide, including ukn22 W1Y (SEQ ID NO: 2638), ukn22 W1F (SEQ ID NO: 2639), ukn22 W1H (SEQ ID NO: 2640), ukn22 W1L (SEQ ID NO: 2641) and ukn22 W1A (SEQ ID NO: 2642) as listed in Table X3.

[0371] Construction of the six-member lasso peptide library followed the method described in Example 2. The plasmid vectors encoding the MBP-ukn22 precursor peptide (peptide No: 525) was mutagenized to generate five ukn22 precursor peptide variants (variants of peptide No: 525). Each of the five ukn22 precursor peptide variants comprised of the ukn22 leader peptide sequence MEKKKYTAPQLAKVGEFKEATG (SEQ ID NO: 2637) (the leader sequence of peptide No: 525) and a mutated ukn22 core peptide sequence WYTAEWGLELIFVFPRFI (SEQ ID NO: 2632) (the core sequence of peptide No: 525). Following the DNA mutagenesis procedure described in Example 10, the first Tryptophan residue (W) of the ukn22 core peptide sequence was changed to Tyrosin (Y), Phenylalanine (F), Histidine (H), Leucine (L) or Alanine (A). The resulting ukn22 precursor peptide variants were designated as ukn22 W1Y, ukn22 W1F, ukn22 W1H, ukn22 W1L and ukn22 W1A. The linear core sequence of each variant was listed in Table X3. Production of these six lasso peptides was initiated in six separate vessels by sequentially adding one precursor peptide plasmid vector per vessel for ukn22, ukn22 W1Y, ukn22 W1F, ukn22 W1H, ukn22 W1L and ukn22 W1A at the concentration of 10 nM per plasmid vector. Each of the six vessels contained the optimized E. coli BL21 Star(DE3) cell extracts, which were pre-mixed with buffer that contained ATP, GTP, TIP, CTP, amino acids, t-RNA, magnesium glutamate, potassium glutamate, potassium phosphate, and other salts, NAD+, NADPH, and glucose to achieve a total volume of 40 μL. The plasmid vectors encoding MBP-peptidase (peptide No: 1584), MBP-cyclase (peptide No: 2676) and MBP-RRE (peptide No: 3975) were subsequently added into each vessel at the concentration of 10 nM each. The cell-free biosynthesis of the lasso peptides was accomplished by incubating the reaction for 18 hours at 25° C. Each reaction sample was subsequently desalted, concentrated and purified with ZipTip® pipette tips (MilliporeSigma ZipTip®) and subjected to MALDI-TOF analysis on a Bruker UltrafleXtreme MALDI TOF/TOF mass spectrometer. The molecular mass corresponding to the lasso peptide of ukn22 (SEQ ID NO: 2632 minus H₂O), ukn22 W1Y (SEQ ID NO: 2638 minus H₂O), ukn22 W1F (SEQ ID NO: 2639 minus H₂O), ukn22 W1H (SEQ ID NO: 2640 minus H₂O), ukn22 W1L (SEQ ID NO: 2641 minus H₂O) and ukn22 W1A (SEQ ID NO: 2642 minus H₂O) was observed (FIG. 10)

### Example 14

[0372] This study demonstrates cell-free biosynthesis of a six-member lasso peptide library in a single vessel. The library members comprised ukn22 lasso peptide (the lasso peptide of peptide No: 525 (SEQ ID NO: 2632)) and the five variants of ukn22 lasso peptide, including ukn22 W1Y (SEQ ID NO: 2638), ukn22 W1F (SEQ ID NO: 2639), ukn22 W1H (SEQ ID NO: 2640), ukn22 W1L (SEQ ID NO: 2641) and ukn22 W1A (SEQ ID NO: 2642) as listed in Table X3

[0373] Construction of the six-member lasso peptide library followed the method described in Example 13. Production of these six lasso peptides was initiated in a single vessel by simultaneously adding the six precursor peptide plasmids for ukn22, ukn22 W1Y, ukn22 W1F, ukn22 W1H, ukn22 W1L and ukn22 W1A at the concentration of 10 nM per plasmid vector. The single vessel contained the optimized E. coli BL21 Star(DE3) cell extracts, which were pre-mixed with buffer that contained ATP, GTP, TTP, CTP, amino acids, t-RNA, magnesium glutamate, potassium glutamate, potassium phosphate, and other salts, NAD+, NADPH, and glucose to achieve a total volume of 40 μL. The plasmid vectors encoding MBP-peptidase (peptide No: 1584), MBP-cyclase (peptide No: 2676) and MBP-RRE (peptide No: 3975) were subsequently added into the vessel at the concentration of 10 nM each. The cell-free biosynthesis of the lasso peptides was accomplished by incubating the reaction for 18 hours at 25° C. The reaction sample was subsequently desalted, concentrated and purified with ZipTip® pipette tips (MilliporeSigma ZipTip®) and subjected to MALDI-TOF analysis on a Bruker UltrafleXtreme MALDI TOF/TOF mass spectrometer. The molecular mass corresponding to the lasso peptide of ukn22 (SEQ ID NO: 2632 minus H₂O), ukn22 W1Y (SEQ ID NO: 2638 minus H₂O), ukn22 W1F (SEQ ID NO: 2639 minus H₂O), ukn22 W1H (SEQ ID NO: 2640 minus H₂O), ukn22 W1L (SEQ ID NO: 2641 minus H₂O) and ukn22 W1A (SEQ ID NO: 2642 minus H₂O) was observed (FIG. 11).

### Example 15

[0374] This study demonstrates cell-free biosynthesis of cellulonodin lasso peptide WIQGKWGLEIYLIFPRYL (SEQ ID: 2652) where the N-terminal amine group of a tryptophan (W) residue at the first position was cyclized with the side-chain carboxylic acid group of a glutamic acid (E) residue at the ninth position.

[0375] The biosynthetic gene cluster (BGC) DNA sequence from Thermobifida cellulosilytica TB100 containing the open reading fame (ORF) (SEQ ID NO: 2644) for a cellulonodin lasso precursor peptide (SEQ ID No: 2645), the ORF (SEQ ID NO: 2646) for cellulonodin peptidase (SEQ ID No: 2647), the ORF (SEQ ID NO: 2648) for cellulonodin cyclase (SEQ ID No: 2649), and the ORF (SEQ ID NO: 2650) for cellulonodin RRE (SEQ ID NO: 2651) were cloned into a pET41a plasmid vector. The identity of the cloned DNA sequences was verified by Sanger DNA sequencing. High purity DNA plasmid vector was prepared by Qiagen Plasmid Maxi Kit. Production of cellulonodin lasso peptide was initiated by adding the cellulonodin BGC plasmid vectors into a single vessel. The vessel contained the optimized E. coli BL21 Star(DE3) cell extracts, which were pre-mixed with buffer that contained ATP, GTP, TTP, CTP, amino acids, t-RNA, magnesium glutamate, potassium glutamate, potassium phosphate, and other salts, NAD+, NADPH, and glucose to achieve a total volume of 20 μL. The concentration of the cellulonodin BGC plasmid vector in the vessel was 40 nM. The cell-free biosynthesis of the lasso peptides was accomplished by incubating the reaction for 18 hours at 25° C. The reaction sample was subsequently desalted, concentrated and purified with ZipTip® pipette tips (MilliporeSigma ZipTip®) and subjected to MALDI-TOF analysis on a Bruker UltrafleXtreme MALDI TOF/TOF mass spectrometer. The molecular mass corresponding to cellulonodin (SEQ ID NO: 2652) minus H₂O) was observed (FIG. 12).

### 7. SEQUENCES

[0376] Various exemplary amino acid and nucleic acid sequences are disclosed in this application, a summary of which are provided in the Table 1. Additionally, Table 2 lists exemplary combinations of various components that can be used in connection with the present methods and systems. Table 3 lists examples of lasso peptidase. Table 4 lists examples of lasso cyclase. Table 5 lists examples of RREs.

TABLE 1
Summary Table

| Class | Description | Peptide No: # |
|---|---|---|
| A | Precursors | 1-1315 |
| B | Peptidase | 1316-2336 |
| C* | Cyclase | 2337-3761 |
| E** | RRE | 3762-4593 |
| CE | cyclase-RRE fusion | 2504 |
| CB | cyclase-peptidase fusion | 2903 |
| CE | cyclase-RRE fusion | 3608 |
| EB | RRE-peptidase fusion | 3768 |
| EB | RRE-peptidase fusion | 3770 |
| EB | RRE-peptidase fusion | 3793 |
| EB | RRE-peptidase fusion | 3811 |
| EB | RRE-peptidase fusion | 3818 |
| EB | RRE-peptidase fusion | 3851 |
| EB | RRE-peptidase fusion | 3855 |
| EB | RRE-peptidase fusion | 3887 |
| EB | RRE-peptidase fusion | 4004 |
| EB | RRE-peptidase fusion | 4018 |
| EB | RRE-peptidase fusion | 4045 |
| EB | RRE-peptidase fusion | 4076 |
| EB | RRE-peptidase fusion | 4132 |
| EB | RRE-peptidase fusion | 4150 |
| EB | RRE-peptidase fusion | 4167 |
| EB | RRE-peptidase fusion | 4168 |
| EB | RRE-peptidase fusion | 4225 |
| EB | RRE-peptidase fusion | 4262 |
| EB | RRE-peptidase fusion | 4379 |
| EB | RRE-peptidase fusion | 4414 |
| EB | RRE-peptidase fusion | 4499 |
| EB | RRE-peptidase fusion | 4504 |
| EB | RRE-peptidase fusion | 4507 |
| EB | RRE-peptidase fusion | 4512 |
| EB | RRE-peptidase fusion | 4517 |
| EB | RRE-peptidase fusion | 4518 |
| EB | RRE-peptidase fusion | 4529 |
| EB | RRE-peptidase fusion | 4532 |
| EB | RRE-peptidase fusion | 4542 |
| EB | RRE-peptidase fusion | 4559 |
| EB | RRE-peptidase fusion | 4561 |
| EB | RRE-peptidase fusion | 4562 |

*including CE and CB fusion sequences
**Including EB fusion sequences

TABLE 2
Exemplary Combinations of (i) Lasso Precursor Peptide; (ii) Lasso
Peptidase; (iii) Lasso Cyclase; (iv) RRE; (v) Peptidase Fusion; and/or
(vi) Cyclase Fusion

| Peptide No: #; GI#; | | | | | |
|---|---|---|---|---|---|
| Accession#; Nucleic | | | | | |
| Acid SEQ ID NO: #; | | | | | |
| Amino Acid SEQ ID | Peptidase | Cyclase | RRE | CE | EB |
| NO: #; Junction | Peptide | Peptide | Peptide | Peptide | Peptide |
| Position | No: # | No: # | No: # | No: # | No: # |
| 1; 167643973; | 1598 | 3360 | n/a | n/a | n/a |
| NC_010338.1; 1; 2; | | | | | |
| 22/23 | | | | | |
| 2; 167643973; | 1598 | 3360 | n/a | n/a | n/a |
| NC_010338.1; 3; 4; | | | | | |
| 21/22 | | | | | |
| 3; 167643973; | 1324 | 2349 | n/a | n/a | n/a |
| NC_010338.1; 5; 6; | | | | | |
| 21/22 | | | | | |
| 4; 167643973; | 1324 | 2349 | n/a | n/a | n/a |
| NC_010338.1; 7; 8; | | | | | |
| 22/23 | | | | | |
| 5; 737103862; | 1943 | 3191 | n/a | n/a | n/a |
| NZ_JQJP01000023.1; 9; | | | | | |
| 10; 21/22 | | | | | |
| 6; 737089868; | 1943 | 3191 | n/a | n/a | n/a |
| NZ_JQJN01000025.1; | | | | | |
| 11; 12; 21/22 | | | | | |
| 7; 737089868; | 1942 | 3190 | n/a | n/a | n/a |
| NZ_JQJN01000025.1; | | | | | |
| 13; 14; 21/22 | | | | | |
| 8; 737089868; | 1942 | 3190 | n/a | n/a | n/a |
| NZ_JQJN01000025.1; | | | | | |
| 15; 16; 21/22 | | | | | |
| 9; 930490730 | 2056 | 3614 | 4407 | n/a | n/a |
| NZ_LJCU01000014.1; | | | | | |
| 17; 18; 13/14 | | | | | |
| 10; 930490730 | 2279 | 3681 | 4541 | n/a | n/a |
| NZ_LJCU01000014.1; | | | | | |
| 19; 20; 13/14 | | | | | |
| 11; 657284919; | 1438 | 2500 | 3861 | n/a | n/a |
| JJMG01000143.1; 21; | | | | | |
| 22; 21/22 | | | | | |
| 12; 657284919; | 2114 | 3635 | 4459 | n/a | n/a |
| JJMG01000143.1; 23; | | | | | |
| 24; 21/22 | | | | | |
| 13; 657284919; | 1988 | 3570 | 4347 | n/a | n/a |
| JJMG01000143.1; 25; | | | | | |
| 26; 21/22 | | | | | |
| 14; 663380895; | n/a | 3091 | 4259 | n/a | n/a |
| NZ_JNZW01000001.1; | | | | | |
| 27; 28; 21/22 | | | | | |
| 15; 485035557; | 1566 | 3438 | n/a | n/a | n/a |
| NZ_AECN01000315.1; | | | | | |
| 29; 30; 28/29 | | | | | |
| 16; 485035557; | 1566 | 2971 | n/a | n/a | n/a |
| NZ_AECN01000315.1; | | | | | |
| 31; 32; 28/29 | | | | | |
| 17; 485035557; | 1565 | 2981 | n/a | n/a | n/a |
| NZ_AECN01000315.1; | | | | | |
| 33; 34; 28/29 | | | | | |
| 18; 485035557; | 1565 | 2970 | n/a | n/a | n/a |
| NZ_AECN01000315.1; | | | | | |
| 35; 36; 28/29 | | | | | |
| 19; 485035557; | 1318 | 2339 | n/a | n/a | n/a |
| NZ_AECN01000315.1; | | | | | |
| 37; 38; 28/29 | | | | | |
| 20; 485035557; | 1644 | 2772 | n/a | n/a | n/a |
| NZ_AECN01000315.1; | | | | | |
| 39; 40; 28/29 | | | | | |
| 21; 485035557; | 1533 | 3393 | n/a | n/a | n/a |
| NZ_AECN01000315.1; | | | | | |
| 41; 42; 28/29 | | | | | |
| 22; 485035557; | 1399 | 2451 | n/a | n/a | n/a |
| NZ_AECN01000315.1; | | | | | |
| 43; 44; 28/29 | | | | | |
| 23; 149147045; | 1571 | 3436 | n/a | n/a | n/a |
| NZ_ABBG01000168.1; | | | | | |
| 45; 46; 28/29 | | | | | |
| 24; 67639376; | 1525 | 3349 | n/a | n/a | n/a |
| NZ_AAHO01000116.1; | | | | | |
| 47; 48; 28/29 | | | | | |
| 25; 149147045; | 1570 | 3300 | n/a | n/a | n/a |
| NZ_ABBG01000168.1; | | | | | |
| 49; 50; 28/29 | | | | | |
| 26; 67639376; | 1523 | 2613 | n/a | n/a | n/a |
| NZ_AAHO01000116.1; | | | | | |
| 51; 52; 28/29 | | | | | |
| 27; 67639376; | 1525 | 3292 | n/a | n/a | n/a |
| NZ_AAHO01000116.1; | | | | | |
| 53; 54; 28/29 | | | | | |
| 28; 67639376; | 1523 | 3283 | n/a | n/a | n/a |
| NZ_AAHO01000116.1; | | | | | |
| 55; 56; 28/29 | | | | | |
| 29; 67639376; | 1526 | 3287 | n/a | n/a | n/a |
| NZ_AAHO01000116.1; | | | | | |
| 57; 58; 28/29 | | | | | |
| 30; 67639376; | 1525 | 2612 | n/a | n/a | n/a |
| NZ_AAHO01000116.1; | | | | | |
| 59; 60; 28/29 | | | | | |
| 31; 67639376; | 1525 | 3280 | n/a | n/a | n/a |
| NZ_AAHO01000116.1; | | | | | |
| 61; 62; 28/29 | | | | | |
| 32; 67639376; | 1526 | 3350 | n/a | n/a | n/a |
| NZ_AAHO01000116.1; | | | | | |
| 63; 64; 28/29 | | | | | |
| 33; 67639376; | 1525 | 3295 | n/a | n/a | n/a |
| NZ_AAHO01000116.1; | | | | | |
| 65; 66; 28/29 | | | | | |
| 34; 67639376; | 1525 | 3285 | n/a | n/a | n/a |
| NZ_AAHO01000116.1; | | | | | |
| 67; 68; 28/29 | | | | | |
| 35; 67639376; | 1523 | 3298 | n/a | n/a | n/a |
| NZ_AAHO01000116.1; | | | | | |
| 69; 70; 28/29 | | | | | |
| 36; 67639376; | 1526 | 3296 | n/a | n/a | n/a |
| NZ_AAHO01000116.1; | | | | | |
| 71; 72; 28/29 | | | | | |
| 37; 67639376; | 1525 | 3544 | n/a | n/a | n/a |
| NZ_AAHO01000116.1; | | | | | |
| 73; 74; 28/29 | | | | | |
| 38; 67639376; | 1526 | 3545 | n/a | n/a | n/a |
| NZ_AAHO01000116.1; | | | | | |
| 75; 76; 28/29 | | | | | |
| 39; 67639376; | 1524 | 2611 | n/a | n/a | n/a |
| NZ_AAHO01000116.1; | | | | | |
| 77; 78; 28/29 | | | | | |
| 40; 67639376; | 1523 | 2614 | n/a | n/a | n/a |
| NZ_AAHO01000116.1; | | | | | |
| 79; 80; 28/29 | | | | | |
| 41; 67639376; | 1526 | 3352 | n/a | n/a | n/a |
| NZ_AAHO01000116.1; | | | | | |
| 81; 82; 28/29 | | | | | |
| 42; 67639376; | 1525 | 3297 | n/a | n/a | n/a |
| NZ_AAHO01000116.1; | | | | | |
| 83; 84; 28/29 | | | | | |
| 43; 67639376; | 1525 | 3290 | n/a | n/a | n/a |
| NZ_AAHO01000116.1; | | | | | |
| 85; 86; 28/29 | | | | | |
| 44; 67639376; | 1396 | 2448 | n/a | n/a | n/a |
| NZ_AAHO01000116.1; | | | | | |
| 87; 88; 28/29 | | | | | |
| 45; 67639376; | 1523 | 3409 | n/a | n/a | n/a |
| NZ_AAHO01000116.1; | | | | | |
| 89; 90; 28/29 | | | | | |
| 46; 67639376; | 1525 | 3293 | n/a | n/a | n/a |
| NZ_AAHO01000116.1; | | | | | |
| 91; 92; 28/29 | | | | | |
| 47; 67639376; | 1526 | 3392 | n/a | n/a | n/a |
| NZ_AAHO01000116.1; | | | | | |
| 93; 94; 28/29 | | | | | |
| 48; 67639376; | 1525 | 3291 | n/a | n/a | n/a |
| NZ_AAHO01000116.1; | | | | | |
| 95; 96; 28/29 | | | | | |
| 49; 67639376; | 1525 | 2951 | n/a | n/a | n/a |
| NZ_AAHO01000116.1; | | | | | |
| 97; 98; 28/29 | | | | | |
| 50; 67639376; | 1525 | 3440 | n/a | n/a | n/a |
| NZ_AAHO01000116.1; | | | | | |
| 99; 100; 28/29 | | | | | |
| 51; 67639376; | 1997 | 3282 | n/a | n/a | n/a |
| NZ_AAHO01000116.1; | | | | | |
| 101; 102; 28/29 | | | | | |
| 52; 67639376; | 1526 | 2615 | n/a | n/a | n/a |
| NZ_AAHO01000116.1; | | | | | |
| 103; 104; 28/29 | | | | | |
| 53; 67639376; | 1395 | 2447 | n/a | n/a | n/a |
| NZ_AAHO01000116.1; | | | | | |
| 105; 106; 28/29 | | | | | |
| 54; 67639376; | 1523 | 2610 | n/a | n/a | n/a |
| NZ_AAHO01000116.1; | | | | | |
| 107; 108; 28/29 | | | | | |
| 55; 67639376; | 1523 | 3437 | n/a | n/a | n/a |
| NZ_AAHO01000116.1; | | | | | |
| 109; 110; 28/29 | | | | | |
| 56; 67639376; | 1526 | 3289 | n/a | n/a | n/a |
| NZ_AAHO01000116.1; | | | | | |
| 111; 112;28/29 | | | | | |
| 57; 67639376; | 1523 | 3351 | n/a | n/a | n/a |
| NZ_AAHO01000116.1; | | | | | |
| 113; 114; 28/29 | | | | | |
| 58; 67639376; | 1525 | 3294 | n/a | n/a | n/a |
| NZ_AAHO01000116.1; | | | | | |
| 115; 116; 28/29 | | | | | |
| 59; 67639376; | 1526 | 3281 | n/a | n/a | n/a |
| NZ_AAHO01000116.1; | | | | | |
| 117; 118; 28/29 | | | | | |
| 60; 67639376; | 1317 | 2338 | n/a | n/a | n/a |
| NZ_AAHO01000116.1; | | | | | |
| 119; 120; 28/29 | | | | | |
| 61; 67639376; | 1525 | 3286 | n/a | n/a | n/a |
| NZ_AAHO01000116.1; | | | | | |
| 121; 122; 28/29 | | | | | |
| 62; 67639376; | 1526 | 2690 | n/a | n/a | n/a |
| NZ_AAHO01000116.1; | | | | | |
| 123; 124; 28/29 | | | | | |
| 63; 67639376; | 1447 | 2509 | n/a | n/a | n/a |
| NZ_AAHO01000116.1; | | | | | |
| 125; 126; 28/29 | | | | | |
| 64; 67639376; | 1404 | 2458 | n/a | n/a | n/a |
| NZ_AAHO01000116.1; | | | | | |
| 127; 128; 28/29 | | | | | |
| 65; 67639376; | 1526 | 3284 | n/a | n/a | n/a |
| NZ_AAHO01000116.1; | | | | | |
| 129; 130; 28/29 | | | | | |
| 66; 67639376; | n/a | 2511 | n/a | n/a | n/a |
| NZ_AAHO01000116.1; | | | | | |
| 131; 132; 28/29 | | | | | |
| 67; 67639376; | 1523 | 3383 | n/a | n/a | n/a |
| NZ_AAHO01000116.1; | | | | | |
| 133; 134; 28/29 | | | | | |
| 68; 740958729; | 1998 | 3288 | n/a | n/a | n/a |
| NZ_JPWT01000001.1; | | | | | |
| 135; 136;28/29 | | | | | |
| 69; 485035557; | 1348 | 2380 | n/a | n/a | n/a |
| NZ_AECN01000315.1; | | | | | |
| 137; 138; 28/29 | | | | | |
| 70; 67639376; | 1520 | 2606 | n/a | n/a | n/a |
| NZ_AAHO01000116.1; | | | | | |
| 139; 140; 28/29 | | | | | |
| 71; 149147045; | 1571 | 2982 | n/a | n/a | n/a |
| NZ_ABBG01000168.1; | | | | | |
| 141; 142; 28/29 | | | | | |
| 72; 149147045; | 1570 | 3299 | n/a | n/a | n/a |
| NZ_ABBG01000168.1; | | | | | |
| 143; 144; 28/29 | | | | | |
| 73; 657295264; | n/a | 3465 | 4235 | n/a | n/a |
| NZ_AZSD01000040.1; | | | | | |
| 145; 146; 25/26 | | | | | |
| 74; 754788309; | 1695 | 2846 | 4184 | n/a | n/a |
| NZ_BBNO01000002.1; | | | | | |
| 147; 148; 29/30 | | | | | |
| 75; 928897585; | 2094 | 3458 | 4440 | n/a | n/a |
| NZ_LGKG01000196.1; | | | | | |
| 149; 150; 29/30 | | | | | |
| 76; 928897585; | 2271 | 3671 | 4537 | n/a | n/a |
| NZ_LGKG01000196.1; | | | | | |
| 151; 152; 29/30 | | | | | |
| 77; 754788309; | 2039 | 3370 | 4393 | n/a | n/a |
| NZ_BBNO01000002.1; | | | | | |
| 153; 154; 29/30 | | | | | |
| 78; 739918964; | 1901 | 3267 | 4494 | n/a | n/a |
| NZ_JJOH01000097.1; | | | | | |
| 155; 156; 29/30 | | | | | |
| 79; 928897585; | 1354 | 2386 | 3791 | n/a | n/a |
| NZ_LGKG01000196.1; | | | | | |
| 157; 158; 29/30 | | | | | |
| 80; 374982757; | 2058 | 3397 | 4029 | n/a | n/a |
| NC_016582.1; 159; 160; | | | | | |
| 13/14 | | | | | |
| 81; 374982757; | 2058 | 3397 | 4029 | n/a | n/a |
| NC_016582.1; 161; 162; | | | | | |
| 28/29 | | | | | |
| 82; 739918964; | 1901 | 3583 | 4295 | n/a | n/a |
| NZ_JJOH01000097.1; | | | | | |
| 163; 164; 29/30 | | | | | |
| 83; 852460626; | 1357 | 2392 | 3794 | n/a | n/a |
| CP011799.1; 165; 166; | | | | | |
| 29/30 | | | | | |
| 84; 514918665; | 1661 | 2797 | 4073 | n/a | n/a |
| NZ_AOPZ01000109.1; | | | | | |
| 167; 168; 32/33 | | | | | |
| 85; 396995461; | 2024 | 3338 | 3939 | n/a | n/a |
| AJGV01000085.1; 169; | | | | | |
| 170; 28/29 | | | | | |
| 86; 739830131; | n/a | 3259 | 4351 | n/a | n/a |
| NZ_JOJE01000039.1; | | | | | |
| 171; 172; 32/33 | | | | | |
| 87; 396995461; | 1400 | 2452 | 3833 | n/a | n/a |
| AJGV01000085.1; 173; | | | | | |
| 174; 28/29 | | | | | |
| 88; 374982757; | 1332 | 2357 | 3767 | n/a | 3768 |
| NC_016582.1; 175; 176; | | | | | |
| 13/14 | | | | | |
| 89; 374982757; | 1332 | 2357 | 3767 | n/a | 3768 |
| NC_016582.1; 177; 178; | | | | | |
| 28/29 | | | | | |
| 90; 664481891; | 2144 | 3121 | 4289 | n/a | n/a |
| NZ_JOJI01000011.1; | | | | | |
| 179; 180; 27/28 | | | | | |
| 91; 663732121; | n/a | 3094 | 4498 | n/a | n/a |
| NZ_JNZQ01000012.1; | | | | | |
| 181; 182; 22/23 | | | | | |
| 92; 742921760; | 1492 | 2571 | n/a | n/a | n/a |
| NZ_JWKL01000093.1; | | | | | |
| 183; 184; 37/38 | | | | | |
| 93; 742921760; | 1492 | 3303 | n/a | n/a | n/a |
| NZ_JWKL01000093.1; | | | | | |
| 185; 186; 37/38 | | | | | |
| 94; 389809081; | 2150 | 3328 | n/a | n/a | n/a |
| NZ_AJXW01000057.1; | | | | | |
| 187; 188; 26/27 | | | | | |
| 95; 389809081; | 1398 | 2450 | n/a | n/a | n/a |
| NZ_AJXW01000057.1; | | | | | |
| 189; 190; 26/27 | | | | | |
| 96; 655566937; | 1830 | 3056 | n/a | n/a | n/a |
| NZ_JAES01000046.1; | | | | | |
| 191; 192; 26/27 | | | | | |
| 97; 749673329; | 2020 | 3333 | 4374 | n/a | n/a |
| NZ_JROO01000009.1; | | | | | |
| 193; 194; 20/21 | | | | | |
| 98; 755108320; | 2046 | 3378 | 4399 | n/a | n/a |
| NZ_BBPN01000056.1; | | | | | |
| 195; 196; 16/17 | | | | | |
| 99; 755108320; | 2049 | 3380 | 4402 | n/a | n/a |
| NZ_BBPN01000056.1; | | | | | |
| 197; 198; 16/17 | | | | | |
| 100; 755077919; | 2047 | 3612 | 4400 | n/a | n/a |
| NZ_BBPQ01000048.1; | | | | | |
| 199; 200; 16/17 | | | | | |
| 101; 755077919; | 2048 | 3613 | 4401 | n/a | n/a |
| NZ_BBPQ01000048.1; | | | | | |
| 201; 202; 16/17 | | | | | |
| 102; 167643973; | 2136 | 2697 | n/a | n/a | n/a |
| NC_010338.1; 203; 204; | | | | | |
| 19/20 | | | | | |
| 103; 167643973; | 2136 | 2697 | n/a | n/a | n/a |
| NC_010338.1; 205; 206; | | | | | |
| 19/20 | | | | | |
| 104; 646523831; | 1607 | 2708 | n/a | n/a | n/a |
| NZ_BATN01000047.1; | | | | | |
| 207; 208; 18/19 | | | | | |
| 105; 646523831; | 2231 | 3420 | n/a | n/a | n/a |
| NZ_BATN01000047.1; | | | | | |
| 209; 210; 18/19 | | | | | |
| 106; 739598481; | 2190 | 3237 | n/a | n/a | n/a |
| NZ_JFHR01000062.1; | | | | | |
| 211; 212; 18/19 | | | | | |
| 107; 739598481; | 2190 | 3237 | n/a | n/a | n/a |
| NZ_JFHR01000062.1; | | | | | |
| 213; 214; 18/19 | | | | | |
| 108; 484272664; | 2203 | 3239 | n/a | n/a | n/a |
| NZ_AKIB01000015.1; | | | | | |
| 215; 216; 18/19 | | | | | |
| 109; 484272664; | 1666 | 2805 | n/a | n/a | n/a |
| NZ_AKIB01000015.1; | | | | | |
| 217; 218; 18/19 | | | | | |
| 110; 646523831; | 2241 | 2972 | n/a | n/a | n/a |
| NZ_BATN01000047.1; | | | | | |
| 219; 220; 18/19 | | | | | |
| 111; 312794749; | 2033 | 2722 | n/a | n/a | n/a |
| NC_014722.1; 221; 222; | | | | | |
| 10/11 | | | | | |
| 112; 312794749; | n/a | 2721 | n/a | n/a | n/a |
| NC_014722.1; 223; 224; | | | | | |
| 25/26 | | | | | |
| 113; 652527059; | n/a | 3434 | n/a | n/a | n/a |
| NZ_KE384226.1; 225; | | | | | |
| 226; 27/28 | | | | | |
| 114; 652527059; | n/a | 3007 | n/a | n/a | n/a |
| NZ_KE384226.1; 227; | | | | | |
| 228; 27/28 | | | | | |
| 115; 652527059; | 1790 | 3006 | n/a | n/a | n/a |
| NZ_KE384226.1; 229; | | | | | |
| 230; 28/29 | | | | | |
| 116; 652527059; | 1790 | 3006 | n/a | n/a | n/a |
| NZ_KE384226.1; 231; | | | | | |
| 232; 29/30 | | | | | |
| 117; 652527059; | 1790 | 3006 | n/a | n/a | n/a |
| NZ_KE384226.1; 233; | | | | | |
| 234; 28/29 | | | | | |
| 118; 483624586; | n/a | 2883 | n/a | n/a | n/a |
| NZ_KB889561.1; 235; | | | | | |
| 236; 23/24 | | | | | |
| 119; 221717172; | 1425 | 2481 | 3856 | n/a | n/a |
| DS999644.1; 237; 238; | | | | | |
| 27/28 | | | | | |
| 120; 221717172; | 1569 | 3148 | 3935 | n/a | n/a |
| DS999644.1; 239; 240; | | | | | |
| 27/28 | | | | | |
| 121; 221717172; | 1917 | 3526 | 3935 | n/a | n/a |
| DS999644.1; 241; 242; | | | | | |
| 27/28 | | | | | |
| 122; 221717172; | 1918 | 3536 | 3935 | n/a | n/a |
| DS999644.1; 243; 244; | | | | | |
| 27/28 | | | | | |
| 123; 664184565; | 1443 | 2505 | 3864 | n/a | n/a |
| NZ_JOGA01000019.1; | | | | | |
| 245; 246; 27/28 | | | | | |
| 124; 664184565; | 1919 | 3151 | 4305 | n/a | n/a |
| NZ_JOGA01000019.1; | | | | | |
| 247; 248; 27/28 | | | | | |
| 125; 764464761; | 1568 | 3140 | 3965 | n/a | n/a |
| NZ_JYBE01000113.1; | | | | | |
| 249; 250; 27/28 | | | | | |
| 126; 664184565; | 1882 | 3146 | 3965 | n/a | n/a |
| NZ_JOGA01000019.1; | | | | | |
| 251; 252; 27/28 | | | | | |
| 127; 764464761; | 1890 | 3156 | 3965 | n/a | n/a |
| NZ_JYBE01000113.1; | | | | | |
| 253; 254; 27/28 | | | | | |
| 128; 764464761; | 1452 | 2516 | 3867 | n/a | n/a |
| NZ_JYBE01000113.1; | | | | | |
| 255; 256; 27/28 | | | | | |
| 129; 764464761; | 1890 | 3411 | 3965 | n/a | n/a |
| NZ_JYBE01000113.1; | | | | | |
| 257; 258; 27/28 | | | | | |
| 130; 664051798; | 1873 | 3145 | 4269 | n/a | n/a |
| NZ_JNZK01000024.1; | | | | | |
| 259; 260; 27/28 | | | | | |
| 131; 664095100; | 1859 | 3154 | 4248 | n/a | n/a |
| NZ_JOED01000028.1; | | | | | |
| 261; 262; 24/25 | | | | | |
| 132; 664095100; | 1859 | 3147 | 4248 | n/a | n/a |
| NZ_JOED01000028.1; | | | | | |
| 263; 264; 24/25 | | | | | |
| 133; 664095100; | 1852 | 3531 | 4292 | n/a | n/a |
| NZ_JOED01000028.1; | | | | | |
| 265; 266; 24/25 | | | | | |
| 134; 664095100; | 1852 | 3123 | 4248 | n/a | n/a |
| NZ_JOED01000028.1; | | | | | |
| 267; 268; 24/25 | | | | | |
| 135; 664095100; | 1852 | 3649 | 4248 | n/a | n/a |
| NZ_JOED01000028.1; | | | | | |
| 269; 270; 24/25 | | | | | |
| 136; 664095100; | 1852 | 3144 | 4248 | n/a | n/a |
| NZ_JOED01000028.1; | | | | | |
| 271; 272; 24/25 | | | | | |
| 137; 664095100; | 1852 | 3141 | 4248 | n/a | n/a |
| NZ_JOED01000028.1; | | | | | |
| 273; 274; 24/25 | | | | | |
| 138; 664095100; | 1852 | 3534 | 4248 | n/a | n/a |
| NZ_JOED01000028.1; | | | | | |
| 275; 276; 24/25 | | | | | |
| 139; 664095100; | 1859 | 3530 | 4248 | n/a | n/a |
| NZ_JOED01000028.1; | | | | | |
| 277; 278; 24/25 | | | | | |
| 140; 664095100; | 1883 | 3527 | 4276 | n/a | n/a |
| NZ_JOED01000028.1; | | | | | |
| 279; 280; 24/25 | | | | | |
| 141; 664095100; | 1852 | 3391 | 4248 | n/a | n/a |
| NZ_JOED01000028.1; | | | | | |
| 281; 282; 24/25 | | | | | |
| 142; 664095100; | 1852 | 3528 | 4248 | n/a | n/a |
| NZ_JOED01000028.1; | | | | | |
| 283; 284; 24/25 | | | | | |
| 143; 484070161; | 1708 | 2862 | 4109 | n/a | n/a |
| NZ_KB898999.1; 285; | | | | | |
| 286; 24/25 | | | | | |
| 144; 664095100; | 1852 | 3529 | 4248 | n/a | n/a |
| NZ_JOED01000028.1; | | | | | |
| 287; 288; 24/25 | | | | | |
| 145; 664095100; | 1883 | 3651 | 4276 | n/a | n/a |
| NZ_JOED01000028.1; | | | | | |
| 289; 290; 24/25 | | | | | |
| 146; 664095100; | 1878 | 3152 | 4247 | n/a | n/a |
| NZ_JOED01000028.1; | | | | | |
| 291; 292; 24/25 | | | | | |
| 147; 664095100; | 1851 | 3153 | 4247 | n/a | n/a |
| NZ_JOED01000028.1; | | | | | |
| 293; 294; 24/25 | | | | | |
| 148; 664049400; | 1872 | 3176 | 4268 | n/a | n/a |
| NZ_JOEZ01000021.1; | | | | | |
| 295; 296; 24/25 | | | | | |
| 149; 695845602; | 1343 | 2375 | 3782 | n/a | n/a |
| NZ_JNWU01000018.1; | | | | | |
| 297; 298; 24/25 | | | | | |
| 150; 695845602; | 1645 | 3404 | 4413 | n/a | n/a |
| NZ_JNWU01000018.1; | | | | | |
| 299; 300; 24/25 | | | | | |
| 151; 695845602; | 1916 | 3143 | 4304 | n/a | n/a |
| NZ_JNWU01000018.1; | | | | | |
| 301; 302; 24/25 | | | | | |
| 152; 943927948; | 1902 | 3150 | 4296 | n/a | n/a |
| NZ_LIQV01000315.1; | | | | | |
| 303; 304; 24/25 | | | | | |
| 153; 654969845; | 2256 | 3647 | 4119 | n/a | n/a |
| NZ_ARPF01000020.1; | | | | | |
| 305; 306; 16/17 | | | | | |
| 154; 664095100; | 1869 | 3149 | 4265 | n/a | n/a |
| NZ_JOED01000028.1; | | | | | |
| 307; 308; 24/25 | | | | | |
| 155; 664021017; | 1869 | 3149 | 4265 | n/a | n/a |
| NZ_JOEM01000009.1; | | | | | |
| 309; 310; 26/27 | | | | | |
| 156; 664095100; | 1702 | 2856 | 4108 | n/a | n/a |
| NZ_JOED01000028.1; | | | | | |
| 311; 312; 24/25 | | | | | |
| 157; 654969845; | 1701 | 2855 | 4107 | n/a | n/a |
| NZ_ARPF01000020.1; | | | | | |
| 313; 314; 16/17 | | | | | |
| 158; 654969845; | 1821 | 3142 | 4119 | n/a | n/a |
| NZ_ARPF01000020.1; | | | | | |
| 315; 316; 16/17 | | | | | |
| 159; 221717172; | 1391 | 2441 | 3829 | n/a | n/a |
| DS999644.1; 317; 318; | | | | | |
| 27/28 | | | | | |
| 160; 315497051; | 1334 | 2360 | n/a | n/a | n/a |
| NC_014816.1; 319; 320; | | | | | |
| 28/29 | | | | | |
| 161; 315497051; | 1612 | 3364 | n/a | n/a | n/a |
| NC_014816.1; 321; 322; | | | | | |
| 28/29 | | | | | |
| 162; 380356103; | 1368 | 2406 | 3803 | n/a | n/a |
| AB593691.1; 323; 324; | | | | | |
| 26/27 | | | | | |
| 163; 383755859; | 1369 | 2407 | n/a | n/a | n/a |
| NC_017075.1; 325; 326; | | | | | |
| 20/21 | | | | | |
| 164; 383755859; | 1630 | 3401 | n/a | n/a | n/a |
| NC_017075.1; 327; 328; | | | | | |
| 20/21 | | | | | |
| 165; 381171950; | 2146 | 2596 | n/a | n/a | n/a |
| NZ_CAHO01000029.1; | | | | | |
| 329; 330; 29/30 | | | | | |
| 166; 325923334; | 1534 | 2622 | n/a | n/a | n/a |
| NZ_AEQX01000392.1; | | | | | |
| 331; 332; 26/27 | | | | | |
| 167; 325923334; | 1534 | 2622 | n/a | n/a | n/a |
| NZ_AEQX01000392.1; | | | | | |
| 333; 334; 28/29 | | | | | |
| 168; 565808720; | 2065 | 2946 | n/a | n/a | n/a |
| NZ_CM002307.1; 335; | | | | | |
| 336; 26/27 | | | | | |
| 169; 565808720; | 2065 | 2946 | n/a | n/a | n/a |
| NZ_CM002307.1; 337; | | | | | |
| 338; 28/29 | | | | | |
| 170; 825139250; | 2099 | 3467 | n/a | n/a | n/a |
| NZ_JZEH01000001.1; | | | | | |
| 339; 340; 26/27 | | | | | |
| 171; 325923334; | 2099 | 3467 | n/a | n/a | n/a |
| NZ_AEQX01000392.1; | | | | | |
| 341; 342; 28/29 | | | | | |
| 172; 507418017; | 2008 | 3314 | n/a | n/a | n/a |
| NZ_APMC02000050.1; | | | | | |
| 343; 344; 26/27 | | | | | |
| 173; 746486416; | 2008 | 3314 | n/a | n/a | n/a |
| NZ_KL638873.1; 345; | | | | | |
| 346; 28/29 | | | | | |
| 174; 746366822; | 2010 | 3316 | n/a | n/a | n/a |
| NZ_JSZF01000067.1; | | | | | |
| 347; 348; 26/27 | | | | | |
| 175; 746366822; | 2010 | 3316 | n/a | n/a | n/a |
| NZ_JSZF01000067.1; | | | | | |
| 349; 350; 28/29 | | | | | |
| 176; 825156557; | 2100 | 3468 | n/a | n/a | n/a |
| NZ_JZEI01000001.1; | | | | | |
| 351; 352; 25/26 | | | | | |
| 177; 920684790; | 2100 | 3468 | n/a | n/a | n/a |
| NZ_LHBW01000046.1; | | | | | |
| 353; 354; 28/29 | | | | | |
| 178; 507418017; | 2091 | 3451 | n/a | n/a | n/a |
| NZ_APMC02000050.1; | | | | | |
| 355; 356; 26/27 | | | | | |
| 179; 810489403; | 2091 | 3451 | n/a | n/a | n/a |
| NZ_CP011256.1; 357; | | | | | |
| 358; 28/29 | | | | | |
| 180; 746366822; | 2006 | 3312 | n/a | n/a | n/a |
| NZ_JSZF01000067.1; | | | | | |
| 359; 360;26/27 | | | | | |
| 181; 746366822; | 2006 | 3312 | n/a | n/a | n/a |
| NZ_JSZF01000067.1; | | | | | |
| 361; 362; 28/29 | | | | | |
| 182; 507418017; | 2007 | 3313 | n/a | n/a | n/a |
| NZ_APMC02000050.1; | | | | | |
| 363; 364; 26/27 | | | | | |
| 183; 507418017; | 2007 | 3313 | n/a | n/a | n/a |
| NZ_APMC02000050.1; | | | | | |
| 365; 366; 28/29 | | | | | |
| 184; 507418017; | 1665 | 3323 | n/a | n/a | n/a |
| NZ_APMC02000050.1; | | | | | |
| 367; 368; 26/27 | | | | | |
| 185; 507418017; | 1665 | 3323 | n/a | n/a | n/a |
| NZ_APMC02000050.1; | | | | | |
| 369; 370; 28/29 | | | | | |
| 186; 507418017; | 2007 | 3386 | n/a | n/a | n/a |
| NZ_APMC02000050.1; | | | | | |
| 371; 372; 26/27 | | | | | |
| 187; 507418017; | 2007 | 3386 | n/a | n/a | n/a |
| NZ_APMC02000050.1; | | | | | |
| 373; 374; 28/29 | | | | | |
| 188; 746494072; | 2009 | 3315 | n/a | n/a | n/a |
| NZ_KL638866.1; 375; | | | | | |
| 376; 26/27 | | | | | |
| 189; 507418017; | 2009 | 3315 | n/a | n/a | n/a |
| NZ_APMC02000050.1; | | | | | |
| 377; 378; 28/29 | | | | | |
| 190; 507418017; | 1665 | 2804 | n/a | n/a | n/a |
| NZ_APMC02000050.1; | | | | | |
| 379; 380; 26/27 | | | | | |
| 191; 507418017; | 1665 | 2804 | n/a | n/a | n/a |
| NZ_APMC02000050.1; | | | | | |
| 381; 382; 28/29 | | | | | |
| 192; 507418017; | 2245 | 3633 | n/a | n/a | n/a |
| NZ_APMC02000050.1; | | | | | |
| 383; 384; 26/27 | | | | | |
| 193; 920684790; | 2245 | 3633 | n/a | n/a | n/a |
| NZ_LHBW01000046.1; | | | | | |
| 385; 386; 28/29 | | | | | |
| 194; 941965142; | 1477 | 2551 | n/a | n/a | n/a |
| NZ_LKIT01000002.1; | | | | | |
| 387; 388; 26/27 | | | | | |
| 195; 941965142; | 1477 | 2551 | n/a | n/a | n/a |
| NZ_LKIT01000002.1; | | | | | |
| 389; 390; 29/30 | | | | | |
| 196; 893711378; | 1574 | 2663 | n/a | n/a | n/a |
| NZ_KQ236029.1; 391; | | | | | |
| 392; 23/24 | | | | | |
| 197; 893711378; | 2125 | 3501 | n/a | n/a | n/a |
| NZ_KQ236029.1; 393; | | | | | |
| 394; 23/24 | | | | | |
| 198; 893711378; | 1676 | 2818 | n/a | n/a | n/a |
| NZ_KQ236029.1; 395; | | | | | |
| 396; 23/24 | | | | | |
| 199; 763092879; | 2066 | 3403 | n/a | n/a | n/a |
| NZ_JXZE01000003.1; | | | | | |
| 397; 398; 23/24 | | | | | |
| 200; 103485498; | 1320 | 2342 | n/a | n/a | n/a |
| NC_008048.1; 399; 400; | | | | | |
| 18/19 | | | | | |
| 201; 103485498; | 1320 | 2342 | n/a | n/a | n/a |
| NC_008048.1; 401; 402; | | | | | |
| 21/22 | | | | | |
| 202; 103485498; | 2134 | 3357 | n/a | n/a | n/a |
| NC_008048.1; 403; 404; | | | | | |
| 18/19 | | | | | |
| 203; 103485498; | 2134 | 3357 | n/a | n/a | n/a |
| NC_008048.1; 405; 406; | | | | | |
| 21/22 | | | | | |
| 204; 924898949; | 1361 | 2396 | n/a | n/a | n/a |
| NZ_CP009452.1; 407; | | | | | |
| 408; 21/22 | | | | | |
| 205; 738613868; | 1964 | 3217 | n/a | n/a | n/a |
| NZ_JYZ01000002.1; | | | | | |
| 409; 410; 21/22 | | | | | |
| 206; 834156795; | n/a | 2497 | n/a | n/a | n/a |
| BBRO01000001.1; 411; | | | | | |
| 412; 12/13 | | | | | |
| 207; 834156795; | n/a | 2506 | n/a | n/a | n/a |
| BBRO01000001.1; 413; | | | | | |
| 414; 12/13 | | | | | |
| 208; 834156795; | 1985 | 3251 | n/a | n/a | n/a |
| BBRO01000001.1; 415; | | | | | |
| 416; 12/13 | | | | | |
| 209; 924898949; | 2255 | 3646 | n/a | n/a | n/a |
| NZ_CP009452.1; 417; | | | | | |
| 418; 21/22 | | | | | |
| 210; 937372567; | 2281 | 3689 | n/a | n/a | n/a |
| NZ_CP012700.1; 419; | | | | | |
| 420; 20/21 | | | | | |
| 211; 834156795; | 1434 | 2495 | n/a | n/a | n/a |
| BBRO01000001.1; 421; | | | | | |
| 422; 21/22 | | | | | |
| 212; 834156795; | 1434 | 2495 | n/a | n/a | n/a |
| BBRO01000001.1; 423; | | | | | |
| 424; 12/13 | | | | | |
| 213; 103485498; | 1321 | 2343 | n/a | n/a | n/a |
| NC_008048.1; 425; 426; | | | | | |
| 21/22 | | | | | |
| 214; 103485498; | 2028 | 3358 | n/a | n/a | n/a |
| NC_008048.1; 427; 428; | | | | | |
| 21/22 | | | | | |
| 215; 167621728; | 1597 | 2696 | n/a | n/a | n/a |
| NC_010335.1; 429; 430; | | | | | |
| 23/24 | | | | | |
| 216; 167621728; | 1597 | 2696 | n/a | n/a | n/a |
| NC_010335.1; 431; 432; | | | | | |
| 23/24 | | | | | |
| 217; 167621728; | 1597 | 2696 | n/a | n/a | n/a |
| NC_010335.1; 433; 434; | | | | | |
| 23/24 | | | | | |
| 218; 196476886; | 1326 | 2351 | n/a | n/a | n/a |
| CP000747.1; 435; 436; | | | | | |
| 16/17 | | | | | |
| 219; 295429362; | 1331 | 2356 | n/a | n/a | n/a |
| CP002008.1; 437; 438; | | | | | |
| 21/22 | | | | | |
| 220; 295429362; | 1331 | 2356 | n/a | n/a | n/a |
| CP002008.1; 439; 440; | | | | | |
| 18/19 | | | | | |
| 221; 295429362; | 1331 | 2356 | n/a | n/a | n/a |
| CP002008.1; 441; 442; | | | | | |
| 23/24 | | | | | |
| 222; 654573246; | 1817 | 3554 | n/a | n/a | n/a |
| NZ_AUEO01000025.1; | | | | | |
| 443; 444; 21/22 | | | | | |
| 223; 654573246; | 1817 | 3554 | n/a | n/a | n/a |
| NZ_AUEO01000025.1; | | | | | |
| 445; 446; 18/19 | | | | | |
| 224; 654573246; | 1817 | 3554 | n/a | n/a | n/a |
| NZ_AUEO01000025.1; | | | | | |
| 447; 448; 41/42 | | | | | |
| 225; 297196766; | 1389 | 2437 | 3825 | n/a | n/a |
| NZ_CM000951.1; 449; | | | | | |
| 450; 24/25 | | | | | |
| 226; 297196766; | n/a | 3543 | 3944 | n/a | n/a |
| NZ_CM000951.1; 451; | | | | | |
| 452; 24/25 | | | | | |
| 227; 754819815; | 1378 | 2424 | 3817 | n/a | n/a |
| NZ_CDME01000002.1; | | | | | |
| 453; 454; 24/25 | | | | | |
| 228; 754819815; | 1378 | 2424 | 3817 | n/a | n/a |
| NZ_CDME01000002.1; | | | | | |
| 455; 456; 24/25 | | | | | |
| 229; 754819815; | 2042 | 3615 | 4396 | n/a | n/a |
| NZ_CDME01000002.1; | | | | | |
| 457; 458; 24/25 | | | | | |
| 230; 754819815; | 2042 | 3615 | 4396 | n/a | n/a |
| NZ_CDME01000002.1; | | | | | |
| 459; 460; 24/25 | | | | | |
| 231; 487385965; | 1719 | 2878 | 4123 | n/a | n/a |
| NZ_KB911613.1; 461; | | | | | |
| 462; 23/24 | | | | | |
| 232; 487385965; | 1719 | 2878 | 4123 | n/a | n/a |
| NZ_KB911613.1; 463; | | | | | |
| 464; 22/23 | | | | | |
| 233; 458977979; | 1403 | 2457 | 3837 | n/a | n/a |
| NZ_AORZ01000024.1; | | | | | |
| 465; 466; 16/17 | | | | | |
| 234; 458977979; | 1528 | 3549 | 3930 | n/a | n/a |
| NZ_AORZ01000024.1; | | | | | |
| 467; 468; 16/17 | | | | | |
| 235; 825314728; | 2239 | 3470 | n/a | n/a | n/a |
| NZ_LASZ01000003.1; | | | | | |
| 469; 470; 26/27 | | | | | |
| 236; 483972948; | 1704 | 2858 | 4185 | n/a | n/a |
| NZ_KB891808.1; 471; | | | | | |
| 472; 28/29 | | | | | |
| 237; 937505789; | 1476 | 2550 | n/a | n/a | n/a |
| NZ_LJGM01000026.1; | | | | | |
| 473; 474; 26/27 | | | | | |
| 238; 938883590; | 2283 | 3692 | n/a | n/a | n/a |
| NZ_CP012900.1; 475; | | | | | |
| 476; 25/26 | | | | | |
| 239; 663737675; | 2191 | 3572 | 4263 | n/a | n/a |
| NZ_JOJF01000002.1; | | | | | |
| 477; 478; 29/30 | | | | | |
| 240; 835885587; | 2104 | 3593 | n/a | n/a | n/a |
| NZ_KN265462.1; 479; | | | | | |
| 480; 26/27 | | | | | |
| 241; 825314716; | 2101 | 3469 | n/a | n/a | n/a |
| NZ_LASZ01000002.1; | | | | | |
| 481; 482; 26/27 | | | | | |
| 242; 67639376; | 1449 | 2512 | n/a | n/a | n/a |
| NZ_AAHO01000116.1; | | | | | |
| 483; 484; 28/29 | | | | | |
| 243; 835885587; | 1448 | 2510 | n/a | n/a | n/a |
| NZ_KN265462.1; 485; | | | | | |
| 486; 33/34 | | | | | |
| 244; 433601838; | n/a | 2758 | 4044 | n/a | n/a |
| NC_019673.1; 487; 488; | | | | | |
| 26/27 | | | | | |
| 245; 653330442; | 1812 | 3032 | n/a | n/a | n/a |
| NZ_KE386531.1; 489; | | | | | |
| 490; 26/27 | | | | | |
| 246; 389798210; | 1543 | 2633 | n/a | n/a | n/a |
| NZ_AJXV01000032.1; | | | | | |
| 491; 492; 26/27 | | | | | |
| 247; 469816339; | 1643 | 2769 | n/a | n/a | n/a |
| NC_020541.1; 493; 494; | | | | | |
| 26/27 | | | | | |
| 248; 653308965; | 1809 | 3029 | n/a | n/a | n/a |
| NZ_AXBJ01000026.1; | | | | | |
| 495; 496; 24/25 | | | | | |
| 249; 919546651; | n/a | 3629 | n/a | n/a | n/a |
| NZ_JOEL01000060.1; | | | | | |
| 497; 498; 27/28 | | | | | |
| 250; 653321547; | 1810 | 3030 | n/a | n/a | n/a |
| NZ_ATYF01000013.1; | | | | | |
| 499; 500; 26/27 | | | | | |
| 251; 332527785; | 1564 | 2658 | n/a | n/a | n/a |
| NZ_AEWG01000155.1; | | | | | |
| 501; 502; 20/21 | | | | | |
| 252; 269954810; | 1605 | 3541 | 4000 | n/a | n/a |
| NC_013530.1; 503; 504; | | | | | |
| 20/21 | | | | | |
| 253; 943674269; | 1656 | 3565 | 4070 | n/a | n/a |
| NZ_LIQO01000205.1; | | | | | |
| 505; 506; 21/22 | | | | | |
| 254; 663414324; | 1656 | 2794 | 4070 | n/a | n/a |
| NZ_JOHQ01000068.1; | | | | | |
| 507; 508; 21/22 | | | | | |
| 255; 943674269; | 1656 | 3568 | 4070 | n/a | n/a |
| NZ_LIQO01000205.1; | | | | | |
| 509; 510; 21/22 | | | | | |
| 256; 269954810; | 1328 | 2353 | 3765 | n/a | n/a |
| NC_013530.1; 511; 512; | | | | | |
| 20/21 | | | | | |
| 257; 937505789; | 1760 | 3516 | n/a | n/a | n/a |
| NZ_LJGM01000026.1; | | | | | |
| 513; 514; 26/27 | | | | | |
| 258; 663414324; | 1864 | 3563 | 4070 | n/a | n/a |
| NZ_JOHQ01000068.1; | | | | | |
| 515; 516; 21/22 | | | | | |
| 259; 663414324; | 1656 | 3575 | 4070 | n/a | n/a |
| NZ_JOHQ01000068.1; | | | | | |
| 517; 518; 21/22 | | | | | |
| 260; 389759651; | 1548 | 3229 | n/a | n/a | n/a |
| NZ_AJXS01000437.1; | | | | | |
| 519; 520; 26/27 | | | | | |
| 261; 928998800; | 2274 | 3675 | n/a | n/a | n/a |
| NZ_BBYR01000083.1; | | | | | |
| 521; 522; 16/17 | | | | | |
| 262; 943674269; | 1656 | 3673 | 4070 | n/a | n/a |
| NZ_LIQO01000205.1; | | | | | |
| 523; 524; 21/22 | | | | | |
| 263; 856992287; | 2113 | 3484 | 4458 | n/a | n/a |
| NZ_LFKW01000127.1; | | | | | |
| 525; 526; 20/21 | | | | | |
| 264; 938956730; | 2285 | 3694 | n/a | n/a | n/a |
| NZ_CP009429.1; 527; | | | | | |
| 528; 19/20 | | | | | |
| 265; 563282524; | 1419 | 2474 | n/a | n/a | n/a |
| AYSC01000019.1; 529; | | | | | |
| 530; 22/23 | | | | | |
| 266; 399058618; | 1545 | 2636 | n/a | n/a | n/a |
| NZ_AKKE01000021.1; | | | | | |
| 531; 532; 22/23 | | | | | |
| 267; 937372567; | n/a | 3690 | n/a | n/a | n/a |
| NZ_CP012700.1; 533; | | | | | |
| 534; 19/20 | | | | | |
| 268; 825353621; | 2102 | 3471 | 4445 | n/a | n/a |
| NZ_LAYX01000011.1; | | | | | |
| 535; 536; 21/22 | | | | | |
| 269; 937505789; | 2282 | 3691 | n/a | n/a | n/a |
| NZ_LJGM01000026.1; | | | | | |
| 537; 538; 26/27 | | | | | |
| 270; 739702045; | 1446 | 2508 | n/a | n/a | n/a |
| NZ_JNFC01000030.1; | | | | | |
| 539; 540; 18/19 | | | | | |
| 271; 484867900; | n/a | 3448 | 4110 | n/a | n/a |
| NZ_AGNH01000612.1; | | | | | |
| 541; 542; 15/16 | | | | | |
| 272; 162960844; | 1989 | 3257 | 4349 | n/a | n/a |
| NC_003155.4; 543; 544; | | | | | |
| 23/24 | | | | | |
| 273; 162960844; | n/a | 2403 | 3800 | n/a | n/a |
| NC_003155.4; 545; 546; | | | | | |
| 23/24 | | | | | |
| 274; 399069941; | 1544 | 2635 | n/a | n/a | n/a |
| NZ_AKKF01000033.1; | | | | | |
| 547; 548; 22/23 | | | | | |
| 275; 399069941; | 1544 | 2635 | n/a | n/a | n/a |
| NZ_AKKF01000033.1; | | | | | |
| 549; 550; 22/23 | | | | | |
| 276; 738615271; | 1428 | 2485 | n/a | n/a | n/a |
| NZ_JFYZ01000008.1; | | | | | |
| 551; 552; 22/23 | | | | | |
| 277; 739659070; | 1445 | 2507 | n/a | n/a | n/a |
| NZ_JNFD01000017.1; | | | | | |
| 553; 554; 19/20 | | | | | |
| 278; 749188513; | 2011 | 3317 | n/a | n/a | n/a |
| NZ_CP009122.1; 555; | | | | | |
| 556; 19/20 | | | | | |
| 279; 345007964; | 1624 | 3548 | 4025 | n/a | n/a |
| NC_015957.1; 557; 558; | | | | | |
| 24/25 | | | | | |
| 280; 345007964; | 1624 | 3548 | 4025 | n/a | n/a |
| NC_015957.1; 559; 560; | | | | | |
| 24/25 | | | | | |
| 281; 345007964; | 1337 | 2364 | 3771 | n/a | n/a |
| NC_015957.1; 561; 562; | | | | | |
| 24/25 | | | | | |
| 282; 345007964; | 1337 | 2364 | 3771 | n/a | n/a |
| NC_015957.1; 563; 564; | | | | | |
| 24/25 | | | | | |
| 283; 928998724; | 1436 | 2498 | n/a | n/a | n/a |
| NZ_BBYR01000007.1; | | | | | |
| 565; 566; 19/20 | | | | | |
| 284; 484007841; | n/a | 2822 | 4087 | n/a | n/a |
| NZ_ANAD01000138.1; | | | | | |
| 567; 568; 20/21 | | | | | |
| 285; 162960844; | 1583 | 3256 | 4348 | n/a | n/a |
| NC_003155.4; 569; 570; | | | | | |
| 21/22 | | | | | |
| 286; 162960844; | 1366 | 2404 | 3801 | n/a | n/a |
| NC_003155.4; 571; 572; | | | | | |
| 21/22 | | | | | |
| 287; 662133033; | 1894 | 3271 | 4287 | n/a | n/a |
| NZ_KL570321.1; 573; | | | | | |
| 574; 21/22 | | | | | |
| 288; 662133033; | 1850 | 3494 | 4246 | n/a | n/a |
| NZ_KL570321.1; 575; | | | | | |
| 576; 21/22 | | | | | |
| 289; 487404592; | 1725 | 2886 | 4131 | n/a | n/a |
| NZ_ARVW01000001.1; | | | | | |
| 577; 578; 22/23 | | | | | |
| 290; 739659070; | 2215 | 3245 | n/a | n/a | n/a |
| NZ_JNFD01000017.1; | | | | | |
| 579; 580; 19/20 | | | | | |
| 291; 702808005; | 1925 | 3167 | 4311 | n/a | n/a |
| NZ_JNZA01000041.1; | | | | | |
| 581; 582; 21/22 | | | | | |
| 292; 664277815; | 1889 | 3574 | 4281 | n/a | n/a |
| NZ_JOIX01000041.1; | | | | | |
| 583; 584; 21/22 | | | | | |
| 293; 499136900; | 1972 | 3234 | 4345 | n/a | n/a |
| NZ_ASJB01000015.1; | | | | | |
| 585; 586; 20/21 | | | | | |
| 294; 487404592; | 1725 | 2886 | 4131 | n/a | n/a |
| NZ_ARVW01000001.1; | | | | | |
| 587; 588; 22/23 | | | | | |
| 295; 716912366; | 1928 | 3172 | 4314 | n/a | n/a |
| NZ_JRHJ01000016.1; | | | | | |
| 589; 590; 21/22 | | | | | |
| 296; 381200190; | 1567 | 2660 | 3964 | n/a | n/a |
| NZ_JH164855.1; 591; | | | | | |
| 592; 19/20 | | | | | |
| 297; 663300513; | 1856 | 3255 | 4252 | n/a | n/a |
| NZ_JNZY01000033.1; | | | | | |
| 593; 594; 21/22 | | | | | |
| 298; 822214995; | 1355 | 2388 | 3792 | n/a | n/a |
| NZ_CP007699.1; 595; | | | | | |
| 596; 21/22 | | | | | |
| 299; 664013282; | 1868 | 3261 | 4264 | n/a | n/a |
| NZ_JOAP01000011.1; | | | | | |
| 597; 598; 12/13 | | | | | |
| 300; 822214995; | 2095 | 3460 | 4441 | n/a | n/a |
| NZ_CP007699.1; 599; | | | | | |
| 600; 21/22 | | | | | |
| 301; 514916021; | 1409 | 2463 | 3841 | n/a | n/a |
| NZ_AOPZ01000017.1; | | | | | |
| 601; 602; 21/22 | | | | | |
| 302; 514916021; | 1658 | 3258 | 4071 | n/a | n/a |
| NZ_AOPZ01000017.1; | | | | | |
| 603; 604; 21/22 | | | | | |
| 303; 663421576; | 1865 | 3579 | 4260 | n/a | n/a |
| NZ_JOGE01000134.1; | | | | | |
| 605; 606; 21/22 | | | | | |
| 304; 928897596; | 2272 | 3672 | 4538 | n/a | n/a |
| NZ_LGKG01000207.1; | | | | | |
| 607; 608; 21/22 | | | | | |
| 305; 484007121; | n/a | 2756 | 4042 | n/a | n/a |
| NZ_ANAC01000010.1; | | | | | |
| 609; 610; 29/30 | | | | | |
| 306; 484007121; | 1779 | 3377 | 4042 | n/a | n/a |
| NZ_ANAC01000010.1; | | | | | |
| 611; 612; 29/30 | | | | | |
| 307; 646523831; | 2241 | 2972 | n/a | n/a | n/a |
| NZ_BATN01000047.1; | | | | | |
| 613; 614; 18/19 | | | | | |
| 308; 484007121; | 1779 | 2820 | 4042 | n/a | n/a |
| NZ_ANAC01000010.1; | | | | | |
| 615; 616; 29/30 | | | | | |
| 309; 651281457; | 1782 | 3556 | 4488 | n/a | n/a |
| NZ_JADG01000010.1; | | | | | |
| 617; 618; 19/20 | | | | | |
| 310; 664428976; | 1854 | 3080 | 4250 | n/a | n/a |
| NZ_KL585179.1; 619; | | | | | |
| 620; 21/22 | | | | | |
| 311; 926412104; | 2266 | 3663 | 4533 | n/a | n/a |
| NZ_LGDY01000113.1; | | | | | |
| 621; 622; 18/19 | | | | | |
| 312; 703210604; | n/a | 3169 | n/a | n/a | n/a |
| NZ_JNYM01000124.1; | | | | | |
| 623; 624; 44/45 | | | | | |
| 313; 471319476; | 1647 | 2774 | 4059 | n/a | n/a |
| NC_020504.1; 625; 626; | | | | | |
| 21/22 | | | | | |
| 314; 485454803; | 2057 | 3525 | 4408 | n/a | n/a |
| NZ_AFRP01001656.1; | | | | | |
| 627; 628; 21/22 | | | | | |
| 315; 664487325; | 1896 | 3157 | 4290 | n/a | n/a |
| NZ_JOJI01000036.1; | | | | | |
| 629; 630; 29/30 | | | | | |
| 316; 297189896; | 1390 | 2438 | 3826 | n/a | n/a |
| NZ_CM000950.1; 631; | | | | | |
| 632; 21/22 | | | | | |
| 317; 297189896; | 1531 | 3268 | 3933 | n/a | n/a |
| NZ_CM000950.1; 633; | | | | | |
| 634; 21/22 | | | | | |
| 318; 398790069; | 2040 | 3371 | 4394 | n/a | n/a |
| NZ_JH725387.1; 635; | | | | | |
| 636; 21/22 | | | | | |
| 319; 754221033; | n/a | 3277 | 4362 | n/a | n/a |
| NZ_CP007574.1; 637; | | | | | |
| 638; 22/23 | | | | | |
| 320; 928998724; | 2273 | 3674 | n/a | n/a | n/a |
| NZ_BBYR01000007.1; | | | | | |
| 639; 640; 19/20 | | | | | |
| 321; 931609467; | n/a | 3683 | 4543 | n/a | n/a |
| NZ_CP012752.1; 641; | | | | | |
| 642; 24/25 | | | | | |
| 322; 484017897; | 1776 | 2829 | 4124 | n/a | n/a |
| NZ_ANBB01000025.1; | | | | | |
| 643; 644; 20/21 | | | | | |
| 323; 943388237; | 2055 | 3606 | 4406 | n/a | n/a |
| NZ_LIQD01000001.1; | | | | | |
| 645; 646; 21/22 | | | | | |
| 324; 398790069; | 1536 | 2625 | 3938 | n/a | n/a |
| NZ_JH725387.1; 647; | | | | | |
| 648; 21/22 | | | | | |
| 325; 224581107; | 1517 | 2602 | 3926 | n/a | n/a |
| NZ_GG657757.1; 649; | | | | | |
| 650; 19/20 | | | | | |
| 326; 664245663; | 1888 | 3109 | 4279 | n/a | n/a |
| NZ_JODF01000003.1; | | | | | |
| 651; 652; 21/22 | | | | | |
| 327; 664026629; | 1870 | 3096 | 4266 | n/a | n/a |
| NZ_JOAP01000049.1; | | | | | |
| 653; 654; 21/22 | | | | | |
| 328; 764439507; | 1848 | 3410 | 4245 | n/a | n/a |
| NZ_JRKI01000027.1; | | | | | |
| 655; 656; 21/22 | | | | | |
| 329; 662059070; | 1845 | 3076 | 4242 | n/a | n/a |
| NZ_KL571162.1; 657; | | | | | |
| 658; 29/30 | | | | | |
| 330; 739830264; | 1991 | 3260 | 4352 | n/a | n/a |
| NZ_JOJE01000040.1; | | | | | |
| 659; 660; 21/22 | | | | | |
| 331; 662063073; | 2082 | 3432 | 4426 | n/a | n/a |
| NZ_JNXV01000303.1; | | | | | |
| 661; 662; 22/23 | | | | | |
| 332; 664141810; | 1881 | 3105 | 4275 | n/a | n/a |
| NZ_JOCQ01000106.1; | | | | | |
| 663; 664; 29/30 | | | | | |
| 333; 799161588; | n/a | 2525 | 3873 | n/a | n/a |
| NZ_JZWZ01000076.1; | | | | | |
| 665; 666; 25/26 | | | | | |
| 334; 664523889; | 1897 | 3603 | 4291 | n/a | n/a |
| NZ_JOFH01000020.1; | | | | | |
| 667; 668; 23/24 | | | | | |
| 335; 754862786; | 1767 | 2968 | 4177 | n/a | n/a |
| NZ_CP007155.1; 669; | | | | | |
| 670; 40/41 | | | | | |
| 336; 655416831; | 1828 | 3054 | 4226 | n/a | n/a |
| NZ_KE386846.1; 671; | | | | | |
| 672; 20/21 | | | | | |
| 337; 662063073; | n/a | 3077 | 4243 | n/a | n/a |
| NZ_JNXV01000303.1; | | | | | |
| 673; 674; 22/23 | | | | | |
| 338; 664523889; | 1993 | 3552 | 4354 | n/a | n/a |
| NZ_JOFH01000020.1; | | | | | |
| 675; 676; 23/24 | | | | | |
| 339; 663122276; | 1853 | 3252 | 4249 | n/a | n/a |
| NZ_JOFJ01000001.1; | | | | | |
| 677; 678; 20/21 | | | | | |
| 340; 654239557; | 1814 | 3269 | 4213 | n/a | n/a |
| NZ_AZWL01000018.1; | | | | | |
| 679; 680; 21/22 | | | | | |
| 341; 926344107; | 2260 | 3654 | 4525 | n/a | n/a |
| NZ_LGEA01000058.1; | | | | | |
| 681; 682; 19/20 | | | | | |
| 342; 765016627; | 2074 | 3416 | 4416 | n/a | n/a |
| NZ_LK022849.1; 683; | | | | | |
| 684; 22/23 | | | | | |
| 343; 765016627; | 2074 | 3416 | 4416 | n/a | n/a |
| NZ_LK022849.1; 685; | | | | | |
| 686; 22/23 | | | | | |
| 344; 755908329; | 1353 | 2385 | 3790 | n/a | n/a |
| CP007219.1; 687; 688; | | | | | |
| 20/21 | | | | | |
| 345; 664061406; | 1863 | 3668 | 3923 | n/a | n/a |
| NZ_JOES01000059.1; | | | | | |
| 689; 690; 29/30 | | | | | |
| 346; 799161588; | n/a | 3620 | 4431 | n/a | n/a |
| NZ_JZWZ01000076.1; | | | | | |
| 691; 692; 25/26 | | | | | |
| 347; 664061406; | 1514 | 3103 | 3923 | n/a | n/a |
| NZ_JOES01000059.1; | | | | | |
| 693; 694; 29/30 | | | | | |
| 348; 664434000; | 1516 | 2601 | 3925 | n/a | n/a |
| NZ_JOIA01001078.1; | | | | | |
| 695; 696; 21/22 | | | | | |
| 349; 429195484; | 2120 | 2653 | 3959 | n/a | n/a |
| NZ_AEJC01000118.1; | | | | | |
| 697; 698; 22/23 | | | | | |
| 350; 664325162; | 1892 | 3112 | 4284 | n/a | n/a |
| NZ_JOJB01000032.1; | | | | | |
| 699; 700; 21/22 | | | | | |
| 351; 664061406; | 1875 | 3160 | 3923 | n/a | n/a |
| NZ_JOES01000059.1; | | | | | |
| 701; 702; 29/30 | | | | | |
| 352; 657301257; | 2070 | 3412 | 4236 | n/a | n/a |
| NZ_AZSD01000480.1; | | | | | |
| 703; 704; 21/22 | | | | | |
| 353; 657301257; | n/a | 3486 | 4236 | n/a | n/a |
| NZ_AZSD01000480.1; | | | | | |
| 705; 706; 21/22 | | | | | |
| 354; 458984960; | 1529 | 3550 | 3931 | n/a | n/a |
| NZ_AORZ01000079.1; | | | | | |
| 707; 708; 12/13 | | | | | |
| 355; 657301257; | 1835 | 3066 | 4236 | n/a | n/a |
| NZ_AZSD01000480.1; | | | | | |
| 709; 710; 21/22 | | | | | |
| 356; 925315417; | 1863 | 3090 | 3923 | n/a | n/a |
| LGCQ01000244.1; 711; | | | | | |
| 712; 29/30 | | | | | |
| 357; 926371517; | 2262 | 3656 | 4527 | n/a | n/a |
| NZ_LGCW01000271.1; | | | | | |
| 713; 714; 29/30 | | | | | |
| 358; 925315417; | 1514 | 3101 | 3923 | n/a | n/a |
| LGCQ01000244.1; 715; | | | | | |
| 716; 29/30 | | | | | |
| 359; 664325162; | 1858 | 3084 | 4254 | n/a | n/a |
| NZ_JOJB01000032.1; | | | | | |
| 717; 718; 21/22 | | | | | |
| 360; 664061406; | 1514 | 3162 | 3923 | n/a | n/a |
| NZ_JOES01000059.1; | | | | | |
| 719; 720; 29/30 | | | | | |
| 361; 926403453; | 2265 | 3661 | 4530 | n/a | n/a |
| NZ_LGDD01000321.1; | | | | | |
| 721; 722; 21/22 | | | | | |
| 362; 671472153; | 1905 | 2915 | 4152 | n/a | n/a |
| NZ_JOFR01000001.1; | | | | | |
| 723; 724; 21/22 | | | | | |
| 363; 471319476; | 1646 | 2773 | 4058 | n/a | n/a |
| NC_020504.1; 725; 726; | | | | | |
| 18/19 | | | | | |
| 364; 739854483; | 1992 | 3262 | 4353 | n/a | n/a |
| NZ_KL997447.1; 727; | | | | | |
| 728; 21/22 | | | | | |
| 365; 926371520; | n/a | 2540 | 3884 | n/a | n/a |
| NZ_LGCW01000274.1; | | | | | |
| 729; 730; 27/28 | | | | | |
| 366; 485454803; | n/a | 3546 | n/a | n/a | n/a |
| NZ_AFRP01001656.1; | | | | | |
| 731; 732; 21/22 | | | | | |
| 367; 738615271; | 2182 | 3218 | n/a | n/a | n/a |
| NZ_JFYZ01000008.1; | | | | | |
| 733; 734; 21/22 | | | | | |
| 368; 738615271; | 2182 | 3218 | n/a | n/a | n/a |
| NZ_JFYZ01000008.1; | | | | | |
| 735; 736; 21/22 | | | | | |
| 369; 738615271; | 2182 | 3218 | n/a | n/a | n/a |
| NZ_JFYZ01000008.1; | | | | | |
| 737; 738; 22/23 | | | | | |
| 370; 664479796; | n/a | 3120 | n/a | n/a | n/a |
| NZ_JOJI01000005.1; | | | | | |
| 739; 740; 19/20 | | | | | |
| 371; 357397620; | 1628 | 2747 | 4035 | n/a | n/a |
| NC_016111.1; 741; 742; | | | | | |
| 13/14 | | | | | |
| 372; 665604093; | 1904 | 3126 | 4299 | n/a | n/a |
| NZ_JNXR01000023.1; | | | | | |
| 743; 744; 21/22 | | | | | |
| 373; 739674258; | 1981 | 3247 | n/a | n/a | n/a |
| NZ_JQMC01000050.1; | | | | | |
| 745; 746; 23/24 | | | | | |
| 374; 664061406; | 1461 | 2532 | 3876 | n/a | n/a |
| NZ_JOES01000059.1; | | | | | |
| 747; 748; 29/30 | | | | | |
| 375; 664061406; | 1467 | 2538 | 3882 | n/a | n/a |
| NZ_JOES01000059.1; | | | | | |
| 749; 750; 29/30 | | | | | |
| 376; 926371517; | 1469 | 2541 | 3885 | n/a | n/a |
| NZ_LGCW01000271.1; | | | | | |
| 751; 752; 29/30 | | | | | |
| 377; 664244706; | 1886 | 3108 | 4277 | n/a | n/a |
| NZ_JOBD01000002.1; | | | | | |
| 753; 754; 24/25 | | | | | |
| 378; 925315417; | 1463 | 2534 | 3878 | n/a | n/a |
| LGCQ01000244.1; 755; | | | | | |
| 756; 29/30 | | | | | |
| 379; 646529442; | 1769 | 2973 | n/a | n/a | n/a |
| NZ_BATN01000092.1; | | | | | |
| 757; 758; 18/19 | | | | | |
| 380; 906344334; | 2132 | 3513 | n/a | n/a | n/a |
| NZ_LFXA01000002.1; | | | | | |
| 759; 760; 12/13 | | | | | |
| 381; 926344331; | 2261 | 3655 | 4526 | n/a | n/a |
| NZ_LGEA01000105.1; | | | | | |
| 761; 762; 21/22 | | | | | |
| 382; 664421883; | 1893 | 3115 | 4286 | n/a | n/a |
| NZ_JODC01000023.1; | | | | | |
| 763; 764; 21/22 | | | | | |
| 383; 755134941; | 2240 | 3626 | n/a | n/a | n/a |
| NZ_BBPI01000030.1; | | | | | |
| 765; 766; 22/23 | | | | | |
| 384; 663596322; | 1866 | 3602 | 4261 | n/a | n/a |
| NZ_JOEF01000022.1; | | | | | |
| 767; 768; 21/22 | | | | | |
| 385; 664063830; | 1876 | 3098 | 4271 | n/a | n/a |
| NZ_JODT01000002.1; | | | | | |
| 769; 770; 13/14 | | | | | |
| 386; 484203522; | 1691 | 2842 | 4100 | n/a | n/a |
| NZ_AQUI01000002.1; | | | | | |
| 771; 772; 12/13 | | | | | |
| 387; 365867746; | 1394 | 2445 | 3832 | n/a | n/a |
| NZ_AGSW01000272.1; | | | | | |
| 773; 774; 22/23 | | | | | |
| 388; 759802587; | 2059 | 3399 | 4409 | n/a | n/a |
| NZ_CP009438.1; 775; | | | | | |
| 776; 21/22 | | | | | |
| 389; 664325162; | 1358 | 2393 | 3795 | n/a | n/a |
| NZ_JOJB01000032.1; | | | | | |
| 777; 778; 21/22 | | | | | |
| 390; 484008051; | 1680 | 2824 | 4089 | n/a | n/a |
| NZ_ANAD01000197.1; | | | | | |
| 779; 780; 24/25 | | | | | |
| 391; 458848256; | 1540 | 3327 | 3942 | n/a | n/a |
| NZ_AOHO01000055.1; | | | | | |
| 781; 782; 21/22 | | | | | |
| 392; 458848256; | 1402 | 2456 | 3836 | n/a | n/a |
| NZ_AOHO01000055.1; | | | | | |
| 783; 784; 21/22 | | | | | |
| 393; 664478668; | 1855 | 3272 | 4251 | n/a | n/a |
| NZ_JOJI01000002.1; | | | | | |
| 785; 786; 19/20 | | | | | |
| 394; 484008051; | 1778 | 2825 | 4090 | n/a | n/a |
| NZ_ANAD01000197.1; | | | | | |
| 787; 788; 24/25 | | | | | |
| 395; 365867746; | n/a | 3155 | 3946 | n/a | n/a |
| NZ_AGSW01000272.1; | | | | | |
| 789; 790; 22/23 | | | | | |
| 396; 873282818; | n/a | 3487 | 4461 | n/a | n/a |
| NZ_LFEH01000123.1; | | | | | |
| 791; 792; 25/26 | | | | | |
| 397; 664061406; | 1514 | 3382 | 3923 | n/a | n/a |
| NZ_JOES01000059.1; | | | | | |
| 793; 794; 29/30 | | | | | |
| 398; 873282818; | n/a | 3466 | 4234 | n/a | n/a |
| NZ_LFEH01000123.1; | | | | | |
| 795; 796; 25/26 | | | | | |
| 399; 906344339; | 2133 | 3514 | 4471 | n/a | n/a |
| NZ_LFXA01000007.1; | | | | | |
| 797; 798; 19/20 | | | | | |
| 400; 759944049; | 2061 | 3609 | n/a | n/a | n/a |
| NZ_JOAG01000029.1; | | | | | |
| 799; 800; 28/29 | | | | | |
| 401; 557839714; | 1745 | 2913 | n/a | n/a | n/a |
| NZ_AWGF01000010.1; | | | | | |
| 801; 802; 28/29 | | | | | |
| 402; 695870063; | n/a | 3537 | 4306 | n/a | n/a |
| NZ_JNWW01000028.1; | | | | | |
| 803; 804; 23/24 | | | | | |
| 403; 749181963; | 2013 | 3598 | 4368 | n/a | n/a |
| NZ_CP003987.1; 805; | | | | | |
| 806; 12/13 | | | | | |
| 404; 852460626; | 1359 | 2394 | 3796 | n/a | n/a |
| CP011799.1; 807; 808; | | | | | |
| 13/14 | | | | | |
| 405; 374982757; | 1332 | 2357 | 3767 | n/a | 3768 |
| NC_016582.1; 809; 810; | | | | | |
| 13/14 | | | | | |
| 406; 374982757; | 1332 | 2357 | 3767 | n/a | 3768 |
| NC_016582.1; 811; 812; | | | | | |
| 28/29 | | | | | |
| 407; 914607448; | n/a | 2529 | n/a | n/a | n/a |
| NZ_JYNE01000028.1; | | | | | |
| 813; 814; 22/23 | | | | | |
| 408; 663373497; | 1861 | 3088 | 4257 | n/a | n/a |
| NZ_JOFL01000043.1; | | | | | |
| 815; 816; 19/20 | | | | | |
| 409; 764442321; | n/a | 3625 | 4415 | n/a | n/a |
| NZ_JRKI01000041.1; | | | | | |
| 817; 818; 29/30 | | | | | |
| 410; 739702045; | 2214 | 3250 | n/a | n/a | n/a |
| NZ_JNFC01000030.1; | | | | | |
| 819; 820; 18/19 | | | | | |
| 411; 485090585; | n/a | 2870 | 4115 | n/a | n/a |
| NZ_KB907209.1; 821; | | | | | |
| 822; 20/21 | | | | | |
| 412; 764442321; | 1847 | 3586 | 4501 | n/a | n/a |
| NZ_JRKI01000041.1; | | | | | |
| 823; 824; 29/30 | | | | | |
| 413; 514916412; | 1659 | 3591 | 4350 | n/a | n/a |
| NZ_AOPZ01000028.1; | | | | | |
| 825; 826; 33/34 | | | | | |
| 414; 514916412; | 1408 | 2462 | 3840 | n/a | n/a |
| NZ_AOPZ01000028.1; | | | | | |
| 827; 828; 33/34 | | | | | |
| 415; 970574347; | 1839 | 2873 | 4118 | n/a | n/a |
| NZ_LNZF01000001.1; | | | | | |
| 829; 830; 20/21 | | | | | |
| 416; 970574347; | 1768 | 2969 | 4084 | n/a | n/a |
| NZ_LNZI,01000001.1; | | | | | |
| 831; 832; 20/21 | | | | | |
| 417; 906292938; | 1915 | 3139 | n/a | n/a | n/a |
| CXPB01000073.1; 833; | | | | | |
| 834; 18/19 | | | | | |
| 418; 906292938; | 1383 | 2431 | n/a | n/a | n/a |
| CXPB01000073.1; 835; | | | | | |
| 836; 18/19 | | | | | |
| 419; 970574347; | 1662 | 2799 | 4074 | n/a | n/a |
| NZ_LNZF01000001.1; | | | | | |
| 837; 838; 20/21 | | | | | |
| 420; 671525382; | n/a | 3130 | 4496 | n/a | n/a |
| NZ_JODL01000019.1; | | | | | |
| 839; 840; 31/32 | | | | | |
| 421; 652698054; | 1748 | 2934 | 4159 | n/a | n/a |
| NZ_K1912610.1; 841; | | | | | |
| 842; 26/27 | | | | | |
| 422; 652698054; | 1750 | 2936 | 4159 | n/a | n/a |
| NZ_K1912610.1; 843; | | | | | |
| 844; 26/27 | | | | | |
| 423; 756828038; | 2050 | 3381 | 4403 | n/a | n/a |
| NZ_CCNC01000143.1; | | | | | |
| 845; 846; 26/27 | | | | | |
| 424; 662140302; | 2135 | 3356 | 3988 | n/a | n/a |
| NZ_JMUB01000087.1; | | | | | |
| 847; 848; 22/23 | | | | | |
| 425; 751285871; | 2224 | 3342 | 4382 | n/a | n/a |
| NZ_CCNA01000001.1; | | | | | |
| 849; 850; 26/27 | | | | | |
| 426; 662140302; | n/a | 2348 | 3763 | n/a | n/a |
| NZ_JMUB01000087.1; | | | | | |
| 851; 852; 22/23 | | | | | |
| 427; 751292755; | n/a | 3343 | 4381 | n/a | n/a |
| NZ_CCNE01000004.1; | | | | | |
| 853; 854; 26/27 | | | | | |
| 428; 970574347; | n/a | 3419 | 4418 | n/a | n/a |
| NZ_LNZF01000001.1; | | | | | |
| 855; 856; 20/21 | | | | | |
| 429; 484099183; | 1721 | 2880 | 4126 | n/a | n/a |
| NZ_AJTY01001072.1; | | | | | |
| 857; 858; 19/20 | | | | | |
| 430; 484099183; | n/a | 3324 | n/a | n/a | n/a |
| NZ_AJTY01001072.1; | | | | | |
| 859; 860; 19/20 | | | | | |
| 431; 751265275; | n/a | 3340 | 4380 | n/a | n/a |
| NZ_CCMY01000220.1; | | | | | |
| 861; 862; 26/27 | | | | | |
| 432; 662140302; | 2189 | 3079 | 4240 | n/a | n/a |
| NZ_JMUB01000087.1; | | | | | |
| 863; 864; 22/23 | | | | | |
| 433; 428296779; | n/a | 2764 | 4053 | n/a | n/a |
| NC_019751.1; 865; 866; | | | | | |
| 21/22 | | | | | |
| 434; 662140302; | 2162 | 3075 | 4240 | n/a | n/a |
| NZ_JMUB01000087.1; | | | | | |
| 867; 868; 22/23 | | | | | |
| 435; 563312125; | 1319 | 2340 | n/a | n/a | n/a |
| AYTZ01000052.1; 869; | | | | | |
| 870; 31/32 | | | | | |
| 436; 357028583; | n/a | 2621 | 3936 | n/a | n/a |
| NZ_AGSN01000187.1; | | | | | |
| 871; 872; 26/27 | | | | | |
| 437; 655569633; | 1971 | 3057 | 4491 | n/a | n/a |
| NZ_JIA101000002.1; | | | | | |
| 873; 874; 32/33 | | | | | |
| 438; 655569633; | 1971 | 3057 | 4491 | n/a | n/a |
| NZ_JIA101000002.1; | | | | | |
| 875; 876; 43/44 | | | | | |
| 439; 655569633; | 1971 | 3057 | 4491 | n/a | n/a |
| NZ_JI101000002.1; | | | | | |
| 877; 878; 32/33 | | | | | |
| 440; 970574347; | 2017 | 3330 | 4373 | n/a | n/a |
| NZ_LNZF01000001.1; | | | | | |
| 879; 880; 20/21 | | | | | |
| 441; 482849861; | 1563 | 2656 | 3963 | n/a | n/a |
| NZ_AKBU01000001.1; | | | | | |
| 881; 882; 3/4 | | | | | |
| 442; 482849861; | 1506 | 2779 | 3985 | n/a | n/a |
| NZ_AKBU01000001.1; | | | | | |
| 883; 884; 3/4 | | | | | |
| 443; 737350949; | 1945 | 3198 | 4328 | n/a | n/a |
| NZ_APVL01000034.1; | | | | | |
| 885; 886; 27/28 | | | | | |
| 444; 482849861; | 1590 | 2689 | 3985 | n/a | n/a |
| NZ_AKBU01000001.1; | | | | | |
| 887; 888; 3/4 | | | | | |
| 445; 671546962; | n/a | 3131 | n/a | n/a | n/a |
| NZ_KL370786.1; 889; | | | | | |
| 890; 33/34 | | | | | |
| 446; 652698054; | 1346 | 2379 | 3788 | n/a | n/a |
| NZ_KI912610.1; 891; | | | | | |
| 892; 26/27 | | | | | |
| 447; 808064534; | 2088 | 3445 | 4433 | n/a | n/a |
| NZ_KQ040798.1; 893; | | | | | |
| 894; 17/18 | | | | | |
| 448; 808051893; | 2088 | 3445 | 4433 | n/a | n/a |
| NZ_KQ040793.1; 895; | | | | | |
| 896; 17/18 | | | | | |
| 449; 808051893; | 2088 | 3445 | 4433 | n/a | n/a |
| NZ_KQ040793.1; 897; | | | | | |
| 898; 10/11 | | | | | |
| 450; 808051893; | 2088 | 3445 | 4433 | n/a | n/a |
| NZ_KQ040793.1; 899; | | | | | |
| 900; 11/12 | | | | | |
| 451; 484016872; | n/a | 2828 | n/a | n/a | n/a |
| NZ_ANAY01000016.1; | | | | | |
| 901; 902; 27/28 | | | | | |
| 452; 736629899; | n/a | 3185 | 4322 | n/a | n/a |
| NZ_JOTN01000004.1; | | | | | |
| 903; 904; 19/20 | | | | | |
| 453; 483219562; | 1698 | 2850 | 4104 | n/a | n/a |
| NZ_KB901875.1; 905; | | | | | |
| 906; 43/44 | | | | | |
| 454; 375307420; | 1542 | 2632 | 3945 | n/a | n/a |
| NZ_JH601049.1; 907; | | | | | |
| 908; 20/21 | | | | | |
| 455; 664540649; | 1898 | 3124 | 4293 | n/a | n/a |
| NZ_JOAX01000009.1; | | | | | |
| 909; 910; 21/22 | | | | | |
| 456; 765315585; | 2075 | 3417 | 4417 | n/a | n/a |
| NZ_LN812103.1; 911; | | | | | |
| 912; 27/28 | | | | | |
| 457; 765315585; | 2075 | 3417 | 4417 | n/a | n/a |
| NZ_LN812103.1; 913; | | | | | |
| 914; 19/20 | | | | | |
| 458; 484099183; | 1771 | 2976 | 4179 | n/a | n/a |
| NZ_AJTY01001072.1; | | | | | |
| 915; 916; 19/20 | | | | | |
| 459; 647274605; | 1752 | 2948 | 4164 | n/a | n/a |
| NZ_ASSA01000134.1; | | | | | |
| 917; 918; 20/21 | | | | | |
| 460; 970574347; | 1770 | 2974 | 4008 | n/a | n/a |
| NZ_LNZF01000001.1; | | | | | |
| 919; 920; 20/21 | | | | | |
| 461; 970574347; | 1610 | 2717 | 4008 | n/a | n/a |
| NZ_LNZF01000001.1; | | | | | |
| 921; 922; 20/21 | | | | | |
| 462; 749188513; | 2012 | 3318 | 4505 | n/a | n/a |
| NZ_CP009122.1; 923; | | | | | |
| 924; 25/26 | | | | | |
| 463; 749188513; | 2012 | 3318 | 4505 | n/a | n/a |
| NZ_CP009122.1; 925; | | | | | |
| 926; 19/20 | | | | | |
| 464; 647269417; | n/a | 2977 | 4180 | n/a | n/a |
| NZ_ASSB01000031.1; | | | | | |
| 927; 928; 20/21 | | | | | |
| 465; 749188513; | 1350 | 2382 | 3789 | n/a | n/a |
| NZ_CP009122.1; 929; | | | | | |
| 930; 25/26 | | | | | |
| 466; 749188513; | 1350 | 2382 | 3789 | n/a | n/a |
| NZ_CP009122.1; 931; | | | | | |
| 932; 19/20 | | | | | |
| 467; 746717390; | n/a | 3321 | n/a | n/a | n/a |
| NZ_JSEF01000015.1; | | | | | |
| 933; 934; 16/17 | | | | | |
| 468; 738760618; | 1966 | 3221 | 4503 | n/a | n/a |
| NZ_JQCR01000002.1; | | | | | |
| 935; 936; 19/20 | | | | | |
| 469; 647230448; | n/a | 2975 | 4178 | n/a | n/a |
| NZ_ASRY01000102.1; | | | | | |
| 937; 938; 20/21 | | | | | |
| 470; 485067426; | 1714 | 2869 | 4114 | n/a | n/a |
| NZ_KB235914.1; 939; | | | | | |
| 940; 26/27 | | | | | |
| 471; 378759075; | 1522 | 3498 | 3929 | n/a | n/a |
| NZ_AFXE01000029.1; | | | | | |
| 941; 942; 22/23 | | | | | |
| 472; 924434005; | 1840 | 3071 | 4238 | n/a | n/a |
| LIYK01000027.1; 943; | | | | | |
| 944; 20/21 | | | | | |
| 473; 647274605; | 1772 | 2978 | 4181 | n/a | n/a |
| NZ_ASSA01000134.1; | | | | | |
| 945; 946; 20/21 | | | | | |
| 474; 152991597; | 1594 | 2693 | 3989 | n/a | n/a |
| NC_009663.1; 947; 948; | | | | | |
| 36/37 | | | | | |
| 475; 647274605; | 2064 | 2716 | 4007 | n/a | n/a |
| NZ_ASSA01000134.1; | | | | | |
| 949; 950; 20/21 | | | | | |
| 476; 751292755; | n/a | 3341 | 4381 | n/a | n/a |
| NZ_CCNE01000004.1; | | | | | |
| 951; 952; 26/27 | | | | | |
| 477; 256419057; | 1602 | 2702 | 3995 | n/a | n/a |
| NC_013132.1; 953; 954; | | | | | |
| 27/28 | | | | | |
| 478; 256419057; | 1602 | 2702 | 3995 | n/a | n/a |
| NC_013132.1; 955; 956; | | | | | |
| 27/28 | | | | | |
| 479; 806905234; | 2236 | 3443 | 4432 | n/a | n/a |
| NZ_LARW01000040.1; | | | | | |
| 957; 958; 11/12 | | | | | |
| 480; 663372343; | 1860 | 3086 | 4256 | n/a | n/a |
| NZ_JOFL01000022.1; | | | | | |
| 959; 960; 44/45 | | | | | |
| 481; 808064534; | 2089 | 3622 | 4434 | n/a | n/a |
| NZ_KQ040798.1; 961; | | | | | |
| 962; 10/11 | | | | | |
| 482; 808064534; | 2089 | 3622 | 4434 | n/a | n/a |
| NZ_KQ040798.1; 963; | | | | | |
| 964; 17/18 | | | | | |
| 483; 808064534; | 2089 | 3622 | 4434 | n/a | n/a |
| NZ_KQ040798.1; 965; | | | | | |
| 966; 10/11 | | | | | |
| 484; 808064534; | 2089 | 3622 | 4434 | n/a | n/a |
| NZ_KQ040798.1; 967; | | | | | |
| 968; 17/18 | | | | | |
| 485; 566226100; | 1422 | 2477 | 3853 | n/a | n/a |
| AZLX01000058.1; 969; | | | | | |
| 970; 27/28 | | | | | |
| 486; 662097244; | 1846 | 3078 | 4244 | n/a | n/a |
| NZ_KL575165.1; 971; | | | | | |
| 972; 20/21 | | | | | |
| 487; 647274605; | 1823 | 3045 | 4181 | n/a | n/a |
| NZ_ASSA01000134.1; | | | | | |
| 973; 974; 20/21 | | | | | |
| 488; 924434005; | 2000 | 3306 | 4366 | n/a | n/a |
| LIYK01000027.1; 975; | | | | | |
| 976; 20/21 | | | | | |
| 489; 378759075; | 1522 | 2609 | 3929 | n/a | n/a |
| NZ_AFXE01000029.1; | | | | | |
| 977; 978; 22/23 | | | | | |
| 490; 647274605; | 1752 | 3637 | 4520 | n/a | n/a |
| NZ_ASSA01000134.1; | | | | | |
| 979; 980; 20/21 | | | | | |
| 491; 751299847; | n/a | 3344 | 4381 | n/a | n/a |
| NZ_CCMZ01000015.1; | | | | | |
| 981; 982; 26/27 | | | | | |
| 492; 375307420; | 1576 | 2665 | 3967 | n/a | n/a |
| NZ_JH601049.1; 983; | | | | | |
| 984; 20/21 | | | | | |
| 493; 906344334; | 2131 | 3512 | 4470 | n/a | n/a |
| NZ_LFXA01000002.1; | | | | | |
| 985; 986; 25/26 | | | | | |
| 494; 759948103; | 2063 | 3611 | 4412 | n/a | n/a |
| NZ_JOAG01000045.1; | | | | | |
| 987; 988; 27/28 | | | | | |
| 495; 664478668; | 1895 | 3119 | 4288 | n/a | n/a |
| NZ_JOJI01000002.1; | | | | | |
| 989; 990; 19/20 | | | | | |
| 496; 662043624; | n/a | 3264 | 4241 | n/a | n/a |
| NZ_JNXL01000469.1; | | | | | |
| 991; 992; 22/23 | | | | | |
| 497; 906344334; | 1458 | 2528 | 3874 | n/a | n/a |
| NZ_LFXA01000002.1; | | | | | |
| 993; 994; 25/26 | | | | | |
| 498; 664104387; | 1879 | 3102 | 3924 | n/a | n/a |
| NZ_JOJJ01000005.1; | | | | | |
| 995; 996; 19/20 | | | | | |
| 499; 664104387; | 1862 | 3089 | 4258 | n/a | n/a |
| NZ_JOJJ01000005.1; | | | | | |
| 997; 998; 19/20 | | | | | |
| 500; 664104387; | 1880 | 3104 | 4274 | n/a | n/a |
| NZ_JOJJ01000005.1; | | | | | |
| 999; 1000; 19/20 | | | | | |
| 501; 664565137; | 1900 | 3605 | 4511 | n/a | n/a |
| NZ_KL591029.1; 1001; | | | | | |
| 1002; 19/20 | | | | | |
| 502; 664104387; | 1466 | 2537 | 3881 | n/a | n/a |
| NZ_JOJJ01000005.1; | | | | | |
| 1003; 1004; 19/20 | | | | | |
| 503; 664104387; | 1462 | 2533 | 3877 | n/a | n/a |
| NZ_JOJJ01000005.1; | | | | | |
| 1005; 1006; 19/20 | | | | | |
| 504; 664104387; | 1515 | 3669 | 3924 | n/a | n/a |
| NZ_JOJJ01000005.1; | | | | | |
| 1007; 1008; 19/20 | | | | | |
| 505; 664104387; | 1515 | 3161 | 4307 | n/a | n/a |
| NZ_JOJJ01000005.1; | | | | | |
| 1009; 1010; 19/20 | | | | | |
| 506; 664104387; | 1515 | 2600 | 3924 | n/a | n/a |
| NZ_JOJJ01000005.1; | | | | | |
| 1011; 1012; 19/20 | | | | | |
| 507; 664323078; | 1891 | 3111 | 4283 | n/a | n/a |
| NZ_JOIB01000032.1; | | | | | |
| 1013; 1014; 19/20 | | | | | |
| 508; 315499382; | 2137 | 2723 | n/a | n/a | n/a |
| NC_014817.1; 1015; | | | | | |
| 1016; 25/26 | | | | | |
| 509; 315499382; | 2137 | 2723 | n/a | n/a | n/a |
| NC_014817.1; 1017; | | | | | |
| 1018; 25/26 | | | | | |
| 510; 664066234; | 2263 | 3658 | 4272 | n/a | n/a |
| NZ_JOES01000124.1; | | | | | |
| 1019; 1020; 19/20 | | | | | |
| 511; 740092143; | n/a | 3585 | 4358 | n/a | n/a |
| NZ_JFCB01000064.1; | | | | | |
| 1021; 1022; 19/20 | | | | | |
| 512; 930029075; | 2276 | 3677 | n/a | n/a | n/a |
| NZ_LJHO01000007.1; | | | | | |
| 1023; 1024; 18/19 | | | | | |
| 513; 664104387; | 1515 | 3100 | 4273 | n/a | n/a |
| NZ_JOJJ01000005.1; | | | | | |
| 1025; 1026; 19/20 | | | | | |
| 514; 664104387; | 1515 | 3127 | 4258 | n/a | n/a |
| NZ_JOJJ01000005.1; | | | | | |
| 1027; 1028; 19/20 | | | | | |
| 515; 664104387; | 1464 | 2535 | 3879 | n/a | n/a |
| NZ_JOJJ01000005.1; | | | | | |
| 1029; 1030; 19/20 | | | | | |
| 516; 902792184; | n/a | 3511 | 4469 | n/a | n/a |
| NZ_LFVW01000692.1; | | | | | |
| 1031; 1032; 22/23 | | | | | |
| 517; 485125031; | 2161 | 3553 | 4378 | n/a | n/a |
| NZ_BAGL01000055.1; | | | | | |
| 1033; 1034; 18/19 | | | | | |
| 518; 759934284; | 2223 | 3607 | 4410 | n/a | n/a |
| NZ_JOAG01000009.1; | | | | | |
| 1035; 1036; 23/24 | | | | | |
| 519; 759934284; | 2223 | 3607 | 4410 | n/a | n/a |
| NZ_JOAG01000009.1; | | | | | |
| 1037; 1038; 23/24 | | | | | |
| 520; 746288194; | 2004 | 3310 | n/a | n/a | n/a |
| NZ_JRVC01000013.1; | | | | | |
| 1039; 1040; 22/23 | | | | | |
| 521; 664194528; | n/a | 2389 | n/a | n/a | n/a |
| NZ_JOIG01000002.1; | | | | | |
| 1041; 1042; 23/24 | | | | | |
| 522; 664194528; | n/a | 3455 | n/a | n/a | n/a |
| NZ_JOIG01000002.1; | | | | | |
| 1043; 1044; 23/24 | | | | | |
| 523; 664066234; | 1877 | 3099 | 4272 | n/a | n/a |
| NZ_JOES01000124.1; | | | | | |
| 1045; 1046; 19/20 | | | | | |
| 524; 664066234; | 1468 | 2539 | 3883 | n/a | n/a |
| NZ_JOES01000124.1; | | | | | |
| 1047; 1048; 19/20 | | | | | |
| 525; 72160406; | 1584 | 2676 | 3975 | n/a | n/a |
| NC_007333.1; 1049; | | | | | |
| 1050; 22/23 | | | | | |
| 526; 926371520; | n/a | 3657 | 4528 | n/a | n/a |
| NZ_LGCW01000274.1; | | | | | |
| 1051; 1052; 27128 | | | | | |
| 527; 664244706; | 1887 | 3577 | 4278 | n/a | n/a |
| NZ_JOBD01000002.1; | | | | | |
| 1053; 1054; 27/28 | | | | | |
| 528; 739594477; | 1973 | 3236 | n/a | n/a | n/a |
| NZ_JFHR01000025.1; | | | | | |
| 1055; 1056; 22/23 | | | | | |
| 529; 808402906; | 1376 | 2422 | n/a | n/a | n/a |
| CCBH010000144.1; | | | | | |
| 1057; 1058; 23/24 | | | | | |
| 530; 746242072; | 2217 | 3308 | n/a | n/a | n/a |
| NZ_JTDI01000011.1; | | | | | |
| 1059; 1060; 23/24 | | | | | |
| 531; 72160406; | 1584 | 2790 | 3975 | n/a | n/a |
| NC_007333.1; 1061; | | | | | |
| 1062; 22/23 | | | | | |
| 532; 664194528; | n/a | 3106 | n/a | n/a | n/a |
| NZ_JOIG01000002.1; | | | | | |
| 1063; 1064; 23/24 | | | | | |
| 533; 483527356; | 1709 | 2863 | n/a | n/a | n/a |
| NZ_BARE01000016.1; | | | | | |
| 1065; 1066; 22/23 | | | | | |
| 534; 936191447; | n/a | 3687 | n/a | n/a | n/a |
| NZ_LBLZ01000002.1; | | | | | |
| 1067; 1068; 22/23 | | | | | |
| 535; 484226753; | 1692 | 2843 | n/a | n/a | n/a |
| NZ_AQWM01000013.1; | | | | | |
| 1069; 1070; 21/22 | | | | | |
| 536; 664104387; | 1465 | 2536 | 3880 | n/a | n/a |
| NZ_JOJJ01000005.1; | | | | | |
| 1071; 1072; 19/20 | | | | | |
| 537; 484227180; | 1694 | 2845 | 4101 | n/a | n/a |
| NZ_AQWO01000002.1; | | | | | |
| 1073; 1074; 18/19 | | | | | |
| 538; 664104387; | 1515 | 3667 | 3924 | n/a | n/a |
| NZ_JOJJ01000005.1; | | | | | |
| 1075; 1076; 19/20 | | | | | |
| 539; 936191447; | n/a | 2399 | n/a | n/a | n/a |
| NZ_LBLZ01000002.1; | | | | | |
| 1077; 1078; 22/23 | | | | | |
| 540; 484113405; | 1730 | 2895 | n/a | n/a | n/a |
| NZ_BACX01000237.1; | | | | | |
| 1079; 1080; 23/24 | | | | | |
| 541; 664063830; | 1990 | 3571 | 4497 | n/a | n/a |
| NZ_JODT01000002.1; | | | | | |
| 1081; 1082; 28/29 | | | | | |
| 542; 451338568; | 1530 | 2617 | 3932 | n/a | n/a |
| NZ_ANMG01000060.1; | | | | | |
| 1083; 1084; 18/19 | | | | | |
| 543; 544819688; | 1728 | 2892 | n/a | n/a | n/a |
| NZ_ATHL01000147.1; | | | | | |
| 1085; 1086; 18/19 | | | | | |
| 544; 557833377; | 1742 | 2910 | n/a | n/a | n/a |
| NZ_AWGE01000008.1; | | | | | |
| 1087; 1088; 20/21 | | | | | |
| 545; 557833377; | 1742 | 2910 | n/a | n/a | n/a |
| NZ_AWGE01000008.1; | | | | | |
| 1089; 1090; 22/23 | | | | | |
| 546; 347526385; | 1625 | 2743 | n/a | n/a | n/a |
| NC_015976.1; 1091; | | | | | |
| 1092; 21/22 | | | | | |
| 547; 334133217; | 2031 | 2732 | n/a | n/a | n/a |
| NC_015579.1; 1093; | | | | | |
| 1094; 23/24 | | | | | |
| 548; 746241774; | 2002 | 3594 | n/a | n/a | n/a |
| NZ_JTDI01000009.1; | | | | | |
| 1095; 1096; 24/25 | | | | | |
| 549; 659864921; | 1843 | 3074 | n/a | n/a | n/a |
| NZ_JONW01000006.1; | | | | | |
| 1097; 1098; 20/21 | | | | | |
| 550; 659864921; | 1843 | 3074 | n/a | n/a | n/a |
| NZ_JONW01000006.1; | | | | | |
| 1099; 1100;20/21 | | | | | |
| 551; 294023656; | 1608 | 2709 | n/a | n/a | n/a |
| NC_014007.1; 1101; | | | | | |
| 1102; 23/24 | | | | | |
| 552; 749321911; | 1765 | 2966 | n/a | n/a | n/a |
| NZ_CP006644.1; 1103; | | | | | |
| 1104; 18/19 | | | | | |
| 553; 739630357; | 1977 | 3559 | n/a | n/a | n/a |
| NZ_JFYY01000027.1; | | | | | |
| 1105; 1106; 21/22 | | | | | |
| 554; 739622900; | 1975 | 3240 | n/a | n/a | n/a |
| NZ_JPPQ01000069.1; | | | | | |
| 1107; 1108; 12/13 | | | | | |
| 555; 663365281; | n/a | 3589 | 4255 | n/a | n/a |
| NZ_JODN01000094.1; | | | | | |
| 1109; 1110; 22/23 | | | | | |
| 556; 484226810; | 1693 | 2844 | n/a | n/a | n/a |
| NZ_AQWM01000032.1; | | | | | |
| 1111; 1112; 24/25 | | | | | |
| 557; 759429528; | 2177 | 3387 | n/a | n/a | n/a |
| NZ_JEMV01000036.1; | | | | | |
| 1113; 1114; 23/24 | | | | | |
| 558; 654975403; | 2173 | 3043 | 4486 | n/a | n/a |
| NZ_KI601366.1; 1115; | | | | | |
| 1116; 27/28 | | | | | |
| 559; 541476958; | 1729 | 3334 | 4375 | n/a | n/a |
| AWSB01000006.1; | | | | | |
| 1117; 1118; 58/59 | | | | | |
| 560; 484207511; | 1720 | 2879 | 4125 | n/a | n/a |
| NZ_AQUZ01000008.1; | | | | | |
| 1119; 1120; 20/21 | | | | | |
| 561; 484867900; | n/a | 2864 | n/a | n/a | n/a |
| NZ_AGNH01000612.1; | | | | | |
| 1121; 1122; 15/16 | | | | | |
| 562; 544811486; | 1908 | 2891 | n/a | n/a | n/a |
| NZ_ATDP01000107.1; | | | | | |
| 1123; 1124; 17/18 | | | | | |
| 563; 783211546; | 2085 | 3439 | 4428 | n/a | n/a |
| NZ_JZKH01000064.1; | | | | | |
| 1125; 1126; 30/31 | | | | | |
| 564; 873296042; | 2116 | 3488 | n/a | n/a | n/a |
| NZ_LECE01000021.1; | | | | | |
| 1127; 1128; 14/15 | | | | | |
| 565; 651281457; | 1937 | 3557 | 4489 | n/a | n/a |
| NZ_JADG01000010.1; | | | | | |
| 1129; 1130; 20/21 | | | | | |
| 566; 664348063; | n/a | 3495 | 4465 | n/a | n/a |
| NZ_JOFN01000002.1; | | | | | |
| 1131; 1132; 29/30 | | | | | |
| 567; 893711343; | 2123 | 3246 | n/a | n/a | n/a |
| NZ_KQ235994.1; 1133; | | | | | |
| 1134; 12/13 | | | | | |
| 568; 893711343; | 2123 | 3499 | n/a | n/a | n/a |
| NZ_KQ235994.1; 1135; | | | | | |
| 1136; 12/13 | | | | | |
| 569; 663365281; | n/a | 3576 | 4255 | n/a | n/a |
| NZ_JODN01000094.1; | | | | | |
| 1137; 1138; 22/23 | | | | | |
| 570; 739661773; | 1980 | 3587 | n/a | n/a | n/a |
| NZ_JGVR01000002.1; | | | | | |
| 1139; 1140; 13/14 | | | | | |
| 571; 739661773; | 1978 | 2608 | n/a | n/a | n/a |
| NZ_JGVR01000002.1; | | | | | |
| 1141; 1142; 13/14 | | | | | |
| 572; 749188513; | 1349 | 2381 | n/a | n/a | n/a |
| NZ_CP009122.1; 1143; | | | | | |
| 1144; 23/24 | | | | | |
| 573; 734983422; | 1932 | 3181 | n/a | n/a | n/a |
| NZ_JSX101000079.1; | | | | | |
| 1145; 1146; 18/19 | | | | | |
| 574; 930029077; | 2277 | 3678 | n/a | n/a | n/a |
| NZ_LJHO01000009.1; | | | | | |
| 1147; 1148; 22/23 | | | | | |
| 575; 664556736; | 1899 | 3604 | 4294 | n/a | n/a |
| NZ_KL591003.1; 1149; | | | | | |
| 1150; 40/41 | | | | | |
| 576; 739701660; | 1984 | 3249 | n/a | n/a | n/a |
| NZ_JNFC01000024.1; | | | | | |
| 1151; 1152; 20/21 | | | | | |
| 577; 737322991; | 2200 | 3195 | n/a | n/a | n/a |
| NZ_JMQR01000005.1; | | | | | |
| 1153; 1154; 20/21 | | | | | |
| 578; 737322991; | 2200 | 3195 | n/a | n/a | n/a |
| NZ_JMQR01000005.1; | | | | | |
| 1155; 1156; 20/21 | | | | | |
| 579; 557839256; | 1744 | 2912 | n/a | n/a | n/a |
| NZ_AWGF01000005.1; | | | | | |
| 1157; 1158; 24/25 | | | | | |
| 580; 737322991; | 1437 | 2499 | n/a | n/a | n/a |
| NZ_JMQR01000005.1; | | | | | |
| 1159; 1160; 20/21 | | | | | |
| 581; 737322991; | 1437 | 2499 | n/a | n/a | n/a |
| NZ_JMQR01000005.1; | | | | | |
| 1161; 1162; 20/21 | | | | | |
| 582; 783211546; | 2086 | 3621 | 4429 | n/a | n/a |
| NZ_JZKH01000064.1; | | | | | |
| 1163; 1164; 30/31 | | | | | |
| 583; 893711364; | 2124 | 3500 | n/a | n/a | n/a |
| NZ_KQ236015.1; 1165; | | | | | |
| 1166; 21/22 | | | | | |
| 584; 543418148; | 1429 | 2487 | n/a | n/a | n/a |
| BATC01000005.1; | | | | | |
| 1167; 1168; 26/27 | | | | | |
| 585; 797049078; | 2269 | 3666 | 4536 | n/a | n/a |
| JZWX01001028.1; | | | | | |
| 1169; 1170; 25/26 | | | | | |
| 586; 893711364; | 1979 | 3244 | n/a | n/a | n/a |
| NZ_KQ236015.1; 1171; | | | | | |
| 1172; 21/22 | | | | | |
| 587; 327367349; | 1335 | 2361 | n/a | n/a | n/a |
| CP002599.1; 1173; | | | | | |
| 1174; 27/28 | | | | | |
| 588; 494022722; | 1539 | 3242 | n/a | n/a | n/a |
| NZ_CAVK010000217.1; | | | | | |
| 1175; 1176; 21/22 | | | | | |
| 589; 893711343; | 1457 | 2527 | n/a | n/a | n/a |
| NZ_KQ235994.1; 1177; | | | | | |
| 1178; 12/13 | | | | | |
| 590; 930473294; | 2278 | 3680 | 4540 | n/a | n/a |
| NZ_LJCV01000275.1; | | | | | |
| 1179; 1180; 36/37 | | | | | |
| 591; 514419386; | 1827 | 2894 | n/a | n/a | n/a |
| NZ_KE148338.1; 1181; | | | | | |
| 1182; 22/23 | | | | | |
| 592; 930473294; | 1472 | 2546 | 3888 | n/a | n/a |
| NZ_LJCV01000275.1; | | | | | |
| 1183; 1184; 36/37 | | | | | |
| 593; 893711364; | 1521 | 2607 | n/a | n/a | n/a |
| NZ_KQ236015.1; 1185; | | | | | |
| 1186; 21/22 | | | | | |
| 594; 483682977; | 1700 | 2852 | 4483 | n/a | n/a |
| NZ_KB904636.1; 1187; | | | | | |
| 1188; 29/30 | | | | | |
| 595; 893711364; | 1546 | 2637 | n/a | n/a | n/a |
| NZ_KQ236015.1; 1189; | | | | | |
| 1190; 21/22 | | | | | |
| 596; 914607448; | 2148 | 3539 | n/a | n/a | n/a |
| NZ_JYNE01000028.1; | | | | | |
| 1191; 1192;22/23 | | | | | |
| 597; 753809381; | n/a | 2967 | n/a | n/a | n/a |
| NZ_CP006850.1; 1193; | | | | | |
| 1194; 23/24 | | | | | |
| 598; 759941310; | n/a | n/a | n/a | 3608 | n/a |
| NZ_JOAG01000020.1; | | | | | |
| 1195; 1196; 30/31 | | | | | |
| 599; 484023808; | n/a | 2833 | 4092 | n/a | n/a |
| NZ_ANBF01000204.1; | | | | | |
| 1197; 1198; 22/23 | | | | | |
| 600; 763095630; | 2067 | 3405 | n/a | n/a | n/a |
| NZ_JXZE01000009.1; | | | | | |
| 1199; 1200; 23/24 | | | | | |
| 601; 797049078; | 1471 | 2543 | 3886 | n/a | n/a |
| JZWX01001028.1; | | | | | |
| 1201; 1202; 25/26 | | | | | |
| 602; 663818579; | 1867 | 3095 | n/a | n/a | n/a |
| NZ_JNAC01000042.1; | | | | | |
| 1203; 1204; 23/24 | | | | | |
| 603; 541476958; | 1414 | 2468 | 3846 | n/a | n/a |
| AWSB01000006.1; | | | | | |
| 1205; 1206; 58/59 | | | | | |
| 604; 663300941; | 1857 | 3083 | 4253 | n/a | n/a |
| NZ_JNZY01000037.1; | | | | | |
| 1207; 1208; 25/26 | | | | | |
| 605; 196476886; | 1325 | 2350 | n/a | n/a | n/a |
| CP000747.1; 1209; | | | | | |
| 1210; 23/24 | | | | | |
| 606; 797049078; | 1455 | 2524 | 3872 | n/a | n/a |
| JZWX01001028.1; | | | | | |
| 1211; 1212; 25/26 | | | | | |
| 607; 402821166; | 1555 | 2645 | n/a | n/a | n/a |
| NZ_ALVC01000003.1; | | | | | |
| 1213; 1214; 23/24 | | | | | |
| 608; 763095630; | 1451 | 2515 | n/a | n/a | n/a |
| NZ_JXZE01000009.1; | | | | | |
| 1215; 1216; 23/24 | | | | | |
| 609; 483996974; | 1675 | 2817 | n/a | n/a | n/a |
| NZ_AMYX01000026.1; | | | | | |
| 1217; 1218; 21122 | | | | | |
| 610; 759944490; | 2062 | 3610 | 4411 | n/a | n/a |
| NZ_JOAG01000030.1; | | | | | |
| 1219; 1220; 26/27 | | | | | |
| 611; 269095543; | 1327 | 2352 | 3764 | n/a | n/a |
| CP001819.1; 1221; | | | | | |
| 1222; 13/14 | | | | | |
| 612; 393773868; | 2060 | 2647 | n/a | n/a | n/a |
| NZ_AKFJ01000097.1; | | | | | |
| 1223; 1224; 18/19 | | | | | |
| 613; 765344939; | 1982 | 2657 | n/a | n/a | n/a |
| NZ_CP010954.1; 1225; | | | | | |
| 1226; 22/23 | | | | | |
| 614; 873296295; | n/a | 3490 | n/a | n/a | n/a |
| NZ_LECE01000071.1; | | | | | |
| 1227; 1228; 23/24 | | | | | |
| 615; 759431957; | 2053 | 3388 | n/a | n/a | n/a |
| NZ_JEMV01000094.1; | | | | | |
| 1229; 1230; 12/13 | | | | | |
| 616; 765344939; | 2076 | 3421 | n/a | n/a | n/a |
| NZ_CP010954.1; 1231; | | | | | |
| 1232; 22/23 | | | | | |
| 617; 262193326; | 1603 | 2703 | n/a | n/a | n/a |
| NC_013440.1; 1233; | | | | | |
| 1234; 24/25 | | | | | |
| 618; 329889017; | 1508 | 2591 | n/a | n/a | n/a |
| NZ_GL883086.1; 1235; | | | | | |
| 1236; 19/20 | | | | | |
| 619; 664428976; | 1854 | 3116 | 4250 | n/a | n/a |
| NZ_KL585179.1; 1237; | | | | | |
| 1238; 21/22 | | | | | |
| 620; 764364074; | 2230 | 3407 | n/a | n/a | n/a |
| NZ_CP010836.1; 1239; | | | | | |
| 1240; 22/23 | | | | | |
| 621; 764364074; | 2230 | 3407 | n/a | n/a | n/a |
| NZ_CP010836.1; 1241; | | | | | |
| 1242; 19/20 | | | | | |
| 622; 402821307; | 2183 | 3219 | n/a | n/a | n/a |
| NZ_ALVC01000008.1; | | | | | |
| 1243; 1244; 12/13 | | | | | |
| 623; 484115568; | 1775 | 2985 | n/a | n/a | n/a |
| NZ_BACX01000797.1; | | | | | |
| 1245; 1246; 22/23 | | | | | |
| 624; 402821307; | 1556 | 2646 | n/a | n/a | n/a |
| NZ_ALVC01000008.1; | | | | | |
| 1247; 1248; 12/13 | | | | | |
| 625; 386845069; | 1633 | 3599 | 4037 | n/a | n/a |
| NC_017803.1; 1249; | | | | | |
| 1250; 22/23 | | | | | |
| 626; 386845069; | 1339 | 2366 | 3773 | n/a | n/a |
| NC_017803.1; 1251; | | | | | |
| 1252; 22/23 | | | | | |
| 627; 347526385; | n/a | 2742 | n/a | n/a | n/a |
| NC_015976.1; 1253; | | | | | |
| 1254; 12/13 | | | | | |
| 628; 696542396; | 2207 | 3163 | n/a | n/a | n/a |
| NZ_JQH01000002.1; | | | | | |
| 1255; 1256; 20/21 | | | | | |
| 629; 702914619; | 1926 | 3168 | 4312 | n/a | n/a |
| NZ_JNXI01000006.1; | | | | | |
| 1257; 1258; 25/26 | | | | | |
| 630; 602262270; | 1427 | 2484 | 3857 | n/a | n/a |
| JENI01000029.1; 1259; | | | | | |
| 1260; 21/22 | | | | | |
| 631; 739629085; | 1976 | 3241 | n/a | n/a | n/a |
| NZ_JFYY01000016.1; | | | | | |
| 1261; 1262; 23/24 | | | | | |
| 632; 602262270; | 1956 | 3213 | 3980 | n/a | n/a |
| JENI01000029.1; 1263; | | | | | |
| 1264; 21/22 | | | | | |
| 633; 602262270; | n/a | 2683 | 3980 | n/a | n/a |
| JENI01000029.1; 1265; | | | | | |
| 1266; 21/22 | | | | | |
| 634; 602262270; | 1421 | 2476 | 3852 | n/a | n/a |
| JENI01000029.1; 1267; | | | | | |
| 1268; 21/22 | | | | | |
| 635; 659889283; | 1844 | 3253 | n/a | n/a | n/a |
| NZ_JOOE01000001.1; | | | | | |
| 1269; 1270; 18/19 | | | | | |
| 636; 737322991; | 2201 | 3196 | n/a | n/a | n/a |
| NZ_JMQR01000005.1; | | | | | |
| 1271; 1272; 19/20 | | | | | |
| 637; 444405902; | 1509 | 2592 | n/a | n/a | n/a |
| NZ_KB291784.1; 1273; | | | | | |
| 1274; 20/21 | | | | | |
| 638; 444405902; | 1509 | 2592 | n/a | n/a | n/a |
| NZ_KB291784.1; 1275; | | | | | |
| 1276; 20/21 | | | | | |
| 639; 602262270; | 1956 | 3210 | 3980 | n/a | n/a |
| JENI01000029.1; 1277; | | | | | |
| 1278; 21/22 | | | | | |
| 640; 546154317; | 1415 | 2469 | 3847 | n/a | n/a |
| NZ_ACVN02000045.1; | | | | | |
| 1279; 1280; 18/19 | | | | | |
| 641; 602262270; | 1956 | 3212 | 4333 | n/a | n/a |
| JENI01000029.1; 1281; | | | | | |
| 1282; 21/22 | | | | | |
| 642; 938956730; | 2284 | 3693 | n/a | n/a | n/a |
| NZ_CP009429.1; 1283; | | | | | |
| 1284; 20/21 | | | | | |
| 643; 602262270; | 1439 | 2501 | 3862 | n/a | n/a |
| JENI01000029.1; 1285; | | | | | |
| 1286; 21/22 | | | | | |
| 644; 737323704; | n/a | 3197 | n/a | n/a | n/a |
| NZ_JMQR01000012.1; | | | | | |
| 1287; 1288; 19/20 | | | | | |
| 645; 737323704; | n/a | 3197 | n/a | n/a | n/a |
| NZ_JMQR01000012.1; | | | | | |
| 1289; 1290; 18/19 | | | | | |
| 646; 602262270; | 1441 | 2503 | 3863 | n/a | n/a |
| JENI01000029.1; 1291; | | | | | |
| 1292; 21/22 | | | | | |
| 647; 657605746; | 1836 | 3067 | n/a | n/a | n/a |
| NZ_JNIX01000010.1; | | | | | |
| 1293; 1294; 18/19 | | | | | |
| 648; 647728918; | 1774 | 2980 | n/a | n/a | n/a |
| NZ_JHOF01000018.1; | | | | | |
| 1295; 1296; 19/20 | | | | | |
| 649; 938989745; | 2288 | 3697 | n/a | n/a | n/a |
| NZ_CP012897.1; 1297; | | | | | |
| 1298; 20/21 | | | | | |
| 650; 938989745; | 2288 | 3697 | n/a | n/a | n/a |
| NZ_CP012897.1; 1299; | | | | | |
| 1300; 19/20 | | | | | |
| 651; 664434000; | n/a | 3118 | n/a | n/a | n/a |
| NZ_JOIA01001078.1; | | | | | |
| 1301; 1302; 21/22 | | | | | |
| 652; 703243990; | n/a | 3588 | n/a | n/a | n/a |
| NZ_JNYM01001430.1; | | | | | |
| 1303; 1304; 20/21 | | | | | |
| 653; 739699072; | 1983 | 3248 | n/a | n/a | n/a |
| NZ_JNFC01000001.1; | | | | | |
| 1305; 1306; 19/20 | | | | | |
| 654; 739699072; | 1983 | 3248 | n/a | n/a | n/a |
| NZ_JNFC01000001.1; | | | | | |
| 1307; 1308; 19/20 | | | | | |
| 655; 739699072; | 1983 | 3319 | n/a | n/a | n/a |
| NZ_JNFC01000001.1; | | | | | |
| 1309; 1310; 19/20 | | | | | |
| 656; 739699072; | 1983 | 3319 | n/a | n/a | n/a |
| NZ_JNFC01000001.1; | | | | | |
| 1311; 1312; 19/20 | | | | | |
| 657; 343957487; | 1573 | 2662 | n/a | n/a | n/a |
| NZ_AEWF01000005.1; | | | | | |
| 1313; 1314; 31/32 | | | | | |
| 658; 343957487; | 1573 | 2662 | n/a | n/a | n/a |
| NZ_AEWF01000005.1; | | | | | |
| 1315; 1316; 31/32 | | | | | |
| 659; 938154362; | 1364 | 2401 | n/a | n/a | n/a |
| CP009430.1; 1317; | | | | | |
| 1318; 23/24 | | | | | |
| 660; 566155502; | 1746 | 2914 | 4151 | n/a | n/a |
| NZ_CM002285.1; 1319; | | | | | |
| 1320; 37/38 | | | | | |
| 661; 399903251; | n/a | 2453 | 3834 | n/a | n/a |
| ALJK01000024.1; 1321; | | | | | |
| 1322; 22/23 | | | | | |
| 662; 399903251; | n/a | 2453 | 3834 | n/a | n/a |
| ALJK01000024.1; 1323; | | | | | |
| 1324; 21/22 | | | | | |
| 663; 399903251; | n/a | 2453 | 3834 | n/a | n/a |
| ALJK01000024.1; 1325; | | | | | |
| 1326; 24/25 | | | | | |
| 664; 763097360; | 2229 | 3617 | n/a | n/a | n/a |
| NZ_JXZE01000017.1; | | | | | |
| 1327; 1328; 21/22 | | | | | |
| 665; 746290581; | 2218 | 3595 | n/a | n/a | n/a |
| NZ_JRVC01000028.1; | | | | | |
| 1329; 1330; 22/23 | | | | | |
| 666; 739287390; | 2206 | 3137 | 4303 | n/a | n/a |
| NZ_JMFA01000010.1; | | | | | |
| 1331; 1332; 21/22 | | | | | |
| 667; 694033726; | 2206 | 3137 | 4303 | n/a | n/a |
| NZ_JMEM01000016.1; | | | | | |
| 1333; 1334; 21/22 | | | | | |
| 668; 739287390; | 2206 | 3137 | 4303 | n/a | n/a |
| NZ_JMFA01000010.1; | | | | | |
| 1335; 1336; 21/22 | | | | | |
| 669; 483997957; | 1677 | 2819 | n/a | n/a | n/a |
| NZ_AMYY01000002.1; | | | | | |
| 1337; 1338; 20/21 | | | | | |
| 670; 898301838; | n/a | 3510 | n/a | n/a | n/a |
| NZ_LAVK01000307.1; | | | | | |
| 1339; 1340; 36/37 | | | | | |
| 671; 739287390; | 2205 | 3138 | 4303 | n/a | n/a |
| NZ_JMFA01000010.1; | | | | | |
| 1341; 1342; 21/22 | | | | | |
| 672; 739287390; | 2205 | 3138 | 4303 | n/a | n/a |
| NZ_JMFA01000010.1; | | | | | |
| 1343; 1344; 21/22 | | | | | |
| 673; 739287390; | 2205 | 3138 | 4303 | n/a | n/a |
| NZ_JMFA01000010.1; | | | | | |
| 1345; 1346; 21/22 | | | | | |
| 674; 739287390; | 2205 | 3230 | 4303 | n/a | n/a |
| NZ_JMFA01000010.1; | | | | | |
| 1347; 1348; 21/22 | | | | | |
| 675; 739287390; | 2205 | 3230 | 4303 | n/a | n/a |
| NZ_JMFA01000010.1; | | | | | |
| 1349; 1350; 21/22 | | | | | |
| 676; 739287390; | 2205 | 3230 | 4303 | n/a | n/a |
| NZ_JMFA01000010.1; | | | | | |
| 1351; 1352; 21/22 | | | | | |
| 677; 766589647; | 1754 | 2950 | 4166 | n/a | n/a |
| NZ_CEHJ01000007.1; | | | | | |
| 1353; 1354; 18/19 | | | | | |
| 678; 938989745; | 2289 | 3698 | n/a | n/a | n/a |
| NZ_CP012897.1; 1355; | | | | | |
| 1356; 20/21 | | | | | |
| 679; 938989745; | 2289 | 3698 | n/a | n/a | n/a |
| NZ_CP012897.1; 1357; | | | | | |
| 1358; 20/21 | | | | | |
| 680; 739610197; | 1974 | 3238 | n/a | n/a | n/a |
| NZ_EZA02000028.1; | | | | | |
| 1359; 1360; 22/23 | | | | | |
| 681; 766589647; | 2081 | 3430 | 4423 | n/a | n/a |
| NZ_CEHJ01000007.1; | | | | | |
| 1361; 1362; 18/19 | | | | | |
| 682; 896667361; | 2130 | 3509 | 4468 | n/a | n/a |
| NZ_JVGV01000030.1; | | | | | |
| 1363; 1364; 18/19 | | | | | |
| 683; 834156795; | 1435 | 2496 | n/a | n/a | n/a |
| BBRO01000001.1; | | | | | |
| 1365; 1366; 20/21 | | | | | |
| 684; 736736050; | 2184 | 3561 | n/a | n/a | n/a |
| NZ_AWFG01000029.1; | | | | | |
| 1367; 1368; 27/28 | | | | | |
| 685; 766589647; | 1754 | 3424 | 4166 | n/a | n/a |
| NZ_CEHJ01000007.1; | | | | | |
| 1369; 1370; 18/19 | | | | | |
| 686; 938956730; | 1363 | 2400 | n/a | n/a | n/a |
| NZ_CP009429.1; 1371; | | | | | |
| 1372; 19/20 | | | | | |
| 687; 938956730; | 1363 | 2400 | n/a | n/a | n/a |
| NZ_CP009429.1; 1373; | | | | | |
| 1374; 21/22 | | | | | |
| 688; 545327527; | n/a | 2893 | 4376 | n/a | n/a |
| NZ_KE951412.1; 1375; | | | | | |
| 1376; 25/26 | | | | | |
| 689; 545327527; | n/a | 2893 | 4376 | n/a | n/a |
| NZ_KE951412.1; 1377; | | | | | |
| 1378; 13/14 | | | | | |
| 690; 545327527; | n/a | 2893 | 4376 | n/a | n/a |
| NZ_KE951412.1; 1379; | | | | | |
| 1380; 19/20 | | | | | |
| 691; 545327527; | n/a | 2893 | 4376 | n/a | n/a |
| NZ_KE951412.1; 1381; | | | | | |
| 1382; 19/20 | | | | | |
| 692; 541473965; | n/a | 2893 | 4376 | n/a | n/a |
| AWSB01000041.1; | | | | | |
| 1383; 1384; 20/21 | | | | | |
| 693; 896567682; | 2128 | 3507 | n/a | n/a | n/a |
| NZ_JUMH01000022.1; | | | | | |
| 1385; 1386; 16/17 | | | | | |
| 694; 728827031; | 2210 | 3178 | n/a | n/a | n/a |
| NZ_JROG01000008.1; | | | | | |
| 1387; 1388; 20/21 | | | | | |
| 695; 896567682; | 2126 | 3502 | n/a | n/a | n/a |
| NZ_JUMH01000022.1; | | | | | |
| 1389; 1390; 16/17 | | | | | |
| 696; 896567682; | 1914 | 3136 | n/a | n/a | n/a |
| NZ_JUMH01000022.1; | | | | | |
| 1391; 1392; 16/17 | | | | | |
| 697; 387783149; | 2035 | 2752 | 4036 | n/a | n/a |
| NC_017595.1; 1393; | | | | | |
| 1394; 18/19 | | | | | |
| 698; 484021228; | 2156 | 2860 | n/a | n/a | n/a |
| NZ_KB895788.1; 1395; | | | | | |
| 1396; 21/22 | | | | | |
| 699; 269095543; | n/a | 3379 | 3997 | n/a | n/a |
| CP001819.1; 1397; | | | | | |
| 1398; 13/14 | | | | | |
| 700; 663372947; | n/a | 3087 | n/a | n/a | n/a |
| NZ_JOFL01000031.1; | | | | | |
| 1399; 1400; 32/33 | | | | | |
| 701; 692233141; | 1913 | 3135 | n/a | n/a | n/a |
| NZ_JQAK01000001.1; | | | | | |
| 1401; 1402; 24/25 | | | | | |
| 702; 692233141; | 1913 | 3135 | n/a | n/a | n/a |
| NZ_JQAK01000001.1; | | | | | |
| 1403; 1404; 24/25 | | | | | |
| 703; 896520167; | 2127 | 3504 | n/a | n/a | n/a |
| NZ_JVUI01000038.1; | | | | | |
| 1405; 1406; 16/17 | | | | | |
| 704; 194363778; | 1600 | 2699 | n/a | n/a | n/a |
| NC_011071.1; 1407; | | | | | |
| 1408; 36/37 | | | | | |
| 705; 737569369; | 1950 | 3204 | n/a | n/a | n/a |
| NZ_ARYL01000059.1; | | | | | |
| 1409; 1410; 27/28 | | | | | |
| 706; 484033611; | 1686 | 2836 | n/a | n/a | n/a |
| NZ_ANFZ01000008.1; | | | | | |
| 1411; 1412; 20/21 | | | | | |
| 707; 780834515; | n/a | 2522 | n/a | n/a | n/a |
| LADU01000087.1; | | | | | |
| 1413; 1414; 27/28 | | | | | |
| 708; 927084736; | 2268 | 3665 | 4535 | n/a | n/a |
| NZ_LITU01000056.1; | | | | | |
| 1415; 1416; 21/22 | | | | | |
| 709; 522837181; | 1406 | 2460 | 3839 | n/a | n/a |
| NZ_KE352807.1; 1417; | | | | | |
| 1418; 22/23 | | | | | |
| 710; 737569369; | 1938 | 3186 | n/a | n/a | n/a |
| NZ_ARYL01000059.1; | | | | | |
| 1419; 1420; 27/28 | | | | | |
| 711; 737577234; | 1952 | 3206 | n/a | n/a | n/a |
| NZ_AWFH01000002.1; | | | | | |
| 1421; 1422; 27/28 | | | | | |
| 712; 522837181; | 1405 | 2459 | 3838 | n/a | n/a |
| NZ_KE352807.1; 1423; | | | | | |
| 1424; 22/23 | | | | | |
| 713; 522837181; | 1505 | 2587 | 3918 | n/a | n/a |
| NZ_KE352807.1; 1425; | | | | | |
| 1426; 22/23 | | | | | |
| 714; 522837181; | 1504 | 2963 | 3918 | n/a | n/a |
| NZ_KE352807.1; 1427; | | | | | |
| 1428; 22/23 | | | | | |
| 715; 522837181; | 1410 | 2464 | 3842 | n/a | n/a |
| NZ_KE352807.1; 1429; | | | | | |
| 1430; 22/23 | | | | | |
| 716; 522837181; | n/a | 2454 | 3835 | n/a | n/a |
| NZ_KE352807.1; 1431; | | | | | |
| 1432; 22/23 | | | | | |
| 717; 522837181; | n/a | 2964 | 3918 | n/a | n/a |
| NZ_KE352807.1; 1433; | | | | | |
| 1434; 22/23 | | | | | |
| 718; 522837181; | 1763 | 2962 | 3918 | n/a | n/a |
| NZ_KE352807.1; 1435; | | | | | |
| 1436; 22/23 | | | | | |
| 719; 522837181; | 1503 | 2586 | 3918 | n/a | n/a |
| NZ_KE352807.1; 1437; | | | | | |
| 1438; 22/23 | | | | | |
| 720; 522837181; | 1372 | 2415 | 3810 | n/a | n/a |
| NZ_KE352807.1; 1439; | | | | | |
| 1440; 22/23 | | | | | |
| 721; 522837181; | n/a | 2439 | 3827 | n/a | n/a |
| NZ_KE352807.1; 1441; | | | | | |
| 1442; 22/23 | | | | | |
| 722; 822535978; | 2097 | 3462 | n/a | n/a | n/a |
| NZ_JPLE01000028.1; | | | | | |
| 1443; 1444; 35/36 | | | | | |
| 723; 924898949; | 1360 | 2395 | n/a | n/a | n/a |
| NZ_CP009452.1; 1445; | | | | | |
| 1446; 18/19 | | | | | |
| 724; 924516300; | 2252 | 3643 | n/a | n/a | n/a |
| NZ_LDVR01000003.1; | | | | | |
| 1447; 1448; 36/37 | | | | | |
| 725; 541473965; | 1413 | 2467 | 3845 | n/a | n/a |
| AWSB01000041.1; | | | | | |
| 1449; 1450; 20/21 | | | | | |
| 726; 483532492; | 1710 | n/a | n/a | n/a | n/a |
| NZ_BARE01000100.1; | | | | | |
| 1451; 1452; 19/20 | | | | | |
| 727; 655095554; | 1824 | 3224 | 4219 | n/a | n/a |
| NZ_AULE01000001.1; | | | | | |
| 1453; 1454; 22/23 | | | | | |
| 728; 541473965; | n/a | 2893 | 4376 | n/a | n/a |
| AWSB01000041.1; | | | | | |
| 1455; 1456; 20/21 | | | | | |
| 729; 545327527; | n/a | 2893 | 4376 | n/a | n/a |
| NZ_KE951412.1; 1457; | | | | | |
| 1458; 20/21 | | | | | |
| 730; 545327527; | n/a | 2893 | 4376 | n/a | n/a |
| NZ_KE951412.1; 1459; | | | | | |
| 1460; 13/14 | | | | | |
| 731; 545327527; | n/a | 2893 | 4376 | n/a | n/a |
| NZ_KE951412.1; 1461; | | | | | |
| 1462; 20/21 | | | | | |
| 732; 651445346; | n/a | 2994 | 4188 | n/a | n/a |
| NZ_AZVC01000006.1; | | | | | |
| 1463; 1464; 21/22 | | | | | |
| 733; 739650776; | 2208 | 3243 | n/a | n/a | n/a |
| NZ_KL662193.1; 1465; | | | | | |
| 1466; 29/30 | | | | | |
| 734; 260447107; | 1559 | 2651 | 3957 | n/a | n/a |
| NZ_GG703879.1; 1467; | | | | | |
| 1468; 13/14 | | | | | |
| 735; 260447107; | 1559 | 2651 | 3957 | n/a | n/a |
| NZ_GG703879.1; 1469; | | | | | |
| 1470; 20/21 | | | | | |
| 736; 260447107; | 1559 | 2651 | 3957 | n/a | n/a |
| NZ_GG703879.1; 1471; | | | | | |
| 1472; 20/21 | | | | | |
| 737; 260447107; | 1559 | 2651 | 3957 | n/a | n/a |
| NZ_GG703879.1; 1473; | | | | | |
| 1474; 20/21 | | | | | |
| 738; 260447107; | 1559 | 2651 | 3957 | n/a | n/a |
| NZ_GG703879.1; 1475; | | | | | |
| 1476; 20/21 | | | | | |
| 739; 737567115; | 1949 | 3203 | n/a | n/a | n/a |
| NZ_ARYL01000020.1; | | | | | |
| 1477; 1478; 26/27 | | | | | |
| 740; 343957487; | 1572 | 2661 | n/a | n/a | n/a |
| NZ_AEWF01000005.1; | | | | | |
| 1479; 1480; 29/30 | | | | | |
| 741; 528200987; | n/a | 3560 | 4135 | n/a | n/a |
| ATMS01000061.1; | | | | | |
| 1481; 1482; 22/23 | | | | | |
| 742; 896535166; | 1579 | 3505 | n/a | n/a | n/a |
| NZ_JVHW01000017.1; | | | | | |
| 1483; 1484; 33/34 | | | | | |
| 743; 896535166; | 2129 | 3508 | n/a | n/a | n/a |
| NZ_JVHW01000017.1; | | | | | |
| 1485; 1486; 33/34 | | | | | |
| 744; 896535166; | 1579 | 3503 | n/a | n/a | n/a |
| NZ_JVHW01000017.1; | | | | | |
| 1487; 1488; 33/34 | | | | | |
| 745; 730274767; | 2216 | 3179 | n/a | n/a | n/a |
| NZ_JSBN01000149.1; | | | | | |
| 1489; 1490; 22/23 | | | | | |
| 746; 896555871; | 1579 | 3506 | n/a | n/a | n/a |
| NZ_JVRD01000056.1; | | | | | |
| 1491; 1492; 33/34 | | | | | |
| 747; 740097110; | 1994 | 3273 | 4359 | n/a | n/a |
| NZ_JABQ01000001.1; | | | | | |
| 1493; 1494; 48/49 | | | | | |
| 748; 930169273; | 2129 | 3679 | n/a | n/a | n/a |
| NZ_LJJH01000098.1; | | | | | |
| 1495; 1496; 33/34 | | | | | |
| 749; 923067758; | 2250 | 3640 | n/a | n/a | n/a |
| NZ_CP011010.1; 1497; | | | | | |
| 1498; 33/34 | | | | | |
| 750; 484978121; | 1841 | 2866 | n/a | n/a | n/a |
| NZ_AGRB01000040.1; | | | | | |
| 1499; 1500; 33/34 | | | | | |
| 751; 664275807; | n/a | 3573 | 4280 | n/a | n/a |
| NZ_JOIX01000031.1; | | | | | |
| 1501; 1502; 39/40 | | | | | |
| 752; 737580759; | 1953 | 3207 | n/a | n/a | n/a |
| NZ_AWFH01000021.1; | | | | | |
| 1503; 1504;31/32 | | | | | |
| 753; 484978121; | 2249 | 3639 | n/a | n/a | n/a |
| NZ_AGRB01000040.1; | | | | | |
| 1505; 1506; 33/34 | | | | | |
| 754; 896535166; | 1579 | 2667 | n/a | n/a | n/a |
| NZ_JVHW01000017.1; | | | | | |
| 1507; 1508; 33/34 | | | | | |
| 755; 896535166; | 1579 | 3395 | n/a | n/a | n/a |
| NZ_JVHW01000017.1; | | | | | |
| 1509; 1510; 33/34 | | | | | |
| 756; 434402184; | 2027 | 2766 | 4386 | n/a | n/a |
| NC_019757.1; 1511; | | | | | |
| 1512; 27/28 | | | | | |
| 757; 522837181; | n/a | 2440 | 3828 | n/a | n/a |
| NZ_KE352807.1; 1513; | | | | | |
| 1514; 22/23 | | | | | |
| 758; 640451877; | 1759 | 2959 | n/a | n/a | n/a |
| NZ_AYSW01000160.1; | | | | | |
| 1515; 1516; 13/14 | | | | | |
| 759; 640451877; | 1759 | 2959 | n/a | n/a | n/a |
| NZ_AYSW01000160.1; | | | | | |
| 1517; 1518; 17/18 | | | | | |
| 760; 640451877; | 1759 | 2959 | n/a | n/a | n/a |
| NZ_AYSW01000160.1; | | | | | |
| 1519; 1520; 16/17 | | | | | |
| 761; 528200987; | 1411 | 2465 | 3843 | n/a | n/a |
| ATMS01000061.1; | | | | | |
| 1521; 1522; 22/23 | | | | | |
| 762; 780821511; | n/a | 2521 | n/a | n/a | n/a |
| LADW01000068.1; | | | | | |
| 1523; 1524; 24/25 | | | | | |
| 763; 566231608; | 1423 | 2478 | 3854 | n/a | n/a |
| AZMH01000257.1; | | | | | |
| 1525; 1526; 19/20 | | | | | |
| 764; 736764136; | 1940 | 3188 | n/a | n/a | n/a |
| NZ_AWFD01000033.1; | | | | | |
| 1527; 1528; 27/28 | | | | | |
| 765; 737608363; | 1954 | 3208 | n/a | n/a | n/a |
| NZ_ARYJ01000002.1; | | | | | |
| 1529; 1530; 17/18 | | | | | |
| 766; 145690656; | 1322 | 2344 | n/a | n/a | n/a |
| CP000408.1; 1531; | | | | | |
| 1532; 19/20 | | | | | |
| 767; 145690656; | 1322 | 2344 | n/a | n/a | n/a |
| CP000408.1; 1533; | | | | | |
| 1534; 19/20 | | | | | |
| 768; 815863894; | n/a | 3453 | 4436 | n/a | n/a |
| NZ_LAJC01000044.1; | | | | | |
| 1535; 1536; 13/14 | | | | | |
| 769; 145690656; | 1371 | 2413 | 3808 | n/a | n/a |
| CP000408.1; 1537; | | | | | |
| 1538; 19/20 | | | | | |
| 770; 145690656; | 1371 | 2413 | 3808 | n/a | n/a |
| CP000408.1; 1539; | | | | | |
| 1540; 19/20 | | | | | |
| 771; 550281965; | 1416 | 2470 | 3848 | n/a | n/a |
| NZ_ASSJ01000070.1; | | | | | |
| 1541; 1542; 27/28 | | | | | |
| 772; 484113491; | 1731 | 2896 | n/a | n/a | n/a |
| NZ_BACX01000258.1; | | | | | |
| 1543; 1544; 10/11 | | | | | |
| 773; 145690656; | 1592 | 2949 | 3994 | n/a | n/a |
| CP000408.1; 1545; | | | | | |
| 1546; 19/20 | | | | | |
| 774; 145690656; | 1592 | 2949 | 3994 | n/a | n/a |
| CP000408.1; 1547; | | | | | |
| 1548; 19/20 | | | | | |
| 775; 483258918; | 2077 | 3422 | 4419 | n/a | n/a |
| NZ_AMFE01000033.1; | | | | | |
| 1549; 1550; 19/20 | | | | | |
| 776; 483258918; | 2077 | 3422 | 4419 | n/a | n/a |
| NZ_AMFE01000033.1; | | | | | |
| 1551; 1552; 19/20 | | | | | |
| 777; 145690656; | n/a | 2345 | n/a | n/a | n/a |
| CP000408.1; 1553; | | | | | |
| 1554; 19/20 | | | | | |
| 778; 145690656; | n/a | 2345 | n/a | n/a | n/a |
| CP000408.1; 1555; | | | | | |
| 1556; 19/20 | | | | | |
| 779; 483258918; | 2078 | 3425 | 4419 | n/a | n/a |
| NZ_AMFE01000033.1; | | | | | |
| 1557; 1558; 19/20 | | | | | |
| 780; 766595491; | 2078 | 3425 | 4419 | n/a | n/a |
| NZ_CEHM01000004.1; | | | | | |
| 1559; 1560; 19/20 | | | | | |
| 781; 737951550; | 1959 | 3562 | 4334 | n/a | n/a |
| NZ_JAAG01000075.1; | | | | | |
| 1561; 1562; 19/20 | | | | | |
| 782; 879201007; | 1483 | 2557 | 3907 | n/a | n/a |
| CKIK01000005.1; 1563; | | | | | |
| 1564; 19/20 | | | | | |
| 783; 879201007; | 1484 | 3523 | 3907 | n/a | n/a |
| CKIK01000005.1; 1565; | | | | | |
| 1566; 19/20 | | | | | |
| 784; 879201007; | 1483 | 3684 | 3907 | n/a | n/a |
| CKIK01000005.1; 1567; | | | | | |
| 1568; 19/20 | | | | | |
| 785; 879201007; | 1484 | 3524 | 3907 | n/a | n/a |
| CKIK01000005.1; 1569; | | | | | |
| 1570; 19/20 | | | | | |
| 786; 879201007; | 1484 | 2558 | 3907 | n/a | n/a |
| CKIK01000005.1; 1571; | | | | | |
| 1572; 19/20 | | | | | |
| 787; 483258918; | 1671 | 2812 | 4082 | n/a | n/a |
| NZ_AMFE01000033.1; | | | | | |
| 1573; 1574; 19/20 | | | | | |
| 788; 483258918; | 1671 | 2812 | 4082 | n/a | n/a |
| NZ_AMFE01000033.1; | | | | | |
| 1575; 1576; 19/20 | | | | | |
| 789; 879201007; | 1382 | 2430 | 3822 | n/a | n/a |
| CKIK01000005.1; 1577; | | | | | |
| 1578; 19/20 | | | | | |
| 790; 950938054; | 1381 | 2429 | 3821 | n/a | n/a |
| NZ_CIHL01000007.1; | | | | | |
| 1579; 1580; 19/20 | | | | | |
| 791; 739748927; | 1986 | 3254 | 4346 | n/a | n/a |
| NZ_JJMT01000011.1; | | | | | |
| 1581; 1582; 19/20 | | | | | |
| 792; 739748927; | 1986 | 3254 | 4346 | n/a | n/a |
| NZ_JJMT01000011.1; | | | | | |
| 1583; 1584; 19/20 | | | | | |
| 793; 655069822; | 1822 | 3044 | 4218 | n/a | n/a |
| NZ_KI912489.1; 1585; | | | | | |
| 1586; 19/20 | | | | | |
| 794; 655069822; | 1822 | 3044 | 4218 | n/a | n/a |
| NZ_KI912489.1; 1587; | | | | | |
| 1588; 19/20 | | | | | |
| 795; 655069822; | 1822 | 3044 | 4218 | n/a | n/a |
| NZ_KI912489.1; 1589; | | | | | |
| 1590; 19/20 | | | | | |
| 796; 655069822; | 1822 | 3044 | 4218 | n/a | n/a |
| NZ_KI912489.1; 1591; | | | | | |
| 1592; 19/20 | | | | | |
| 797; 655069822; | 1822 | 3044 | 4218 | n/a | n/a |
| NZ_KI912489.1; 1593; | | | | | |
| 1594; 19/20 | | | | | |
| 798; 655069822; | 1822 | 3044 | 4218 | n/a | n/a |
| NZ_KI912489.1; 1595; | | | | | |
| 1596; 19/20 | | | | | |
| 799; 664428976; | 1854 | 3116 | 4250 | n/a | n/a |
| NZ_KL585179.1; 1597; | | | | | |
| 1598; 21/22 | | | | | |
| 800; 325680876; | 1393 | 2444 | 3831 | n/a | n/a |
| NZ_ADKM02000123.1; | | | | | |
| 1599; 1600; 19/20 | | | | | |
| 801; 325680876; | 1507 | 3231 | 4344 | n/a | n/a |
| NZ_ADKM02000123.1; | | | | | |
| 1601; 1602; 19/20 | | | | | |
| 802; 759443001; | n/a | 3389 | 4405 | n/a | n/a |
| NZ_JDUV01000004.1; | | | | | |
| 1603; 1604; 20/21 | | | | | |
| 803; 759443001; | n/a | 3406 | 4405 | n/a | n/a |
| NZ_JDUV01000004.1; | | | | | |
| 1605; 1606; 20/21 | | | | | |
| 804; 551695014; | 1417 | 2471 | 3849 | n/a | n/a |
| AXZG01000035.1; | | | | | |
| 1607; 1608; 18/19 | | | | | |
| 805; 551695014; | 1417 | 2471 | 3849 | n/a | n/a |
| AXZG01000035.1; | | | | | |
| 1609; 1610; 9/10 | | | | | |
| 806; 818310996; | 1456 | 2526 | n/a | n/a | n/a |
| LBRK01000013.1; | | | | | |
| 1611; 1612; 29/30 | | | | | |
| 807; 213690928; | n/a | 2700 | 3992 | n/a | n/a |
| NC_011593.1; 1613; | | | | | |
| 1614; 20/21 | | | | | |
| 808; 383809261; | 1538 | 2628 | 4343 | n/a | n/a |
| NZ_AJJQ01000036.1; | | | | | |
| 1615; 1616; 18/19 | | | | | |
| 809; 383809261; | 1538 | 2628 | 4343 | n/a | n/a |
| NZ_AJJQ01000036.1; | | | | | |
| 1617; 1618; 9/10 | | | | | |
| 810; 551695014; | 1738 | 3233 | 4146 | n/a | n/a |
| AXZG01000035.1; | | | | | |
| 1619; 1620; 18/19 | | | | | |
| 811; 551695014; | 1738 | 3233 | 4146 | n/a | n/a |
| AXZG01000035.1; | | | | | |
| 1621; 1622; 9/10 | | | | | |
| 812; 484007841; | 1679 | 2823 | 4088 | n/a | n/a |
| NZ_ANAD01000138.1; | | | | | |
| 1623; 1624; 28/29 | | | | | |
| 813; 739372122; | 2204 | 3592 | 4343 | n/a | n/a |
| NZ_JQHE01000003.1; | | | | | |
| 1625; 1626; 11/12 | | | | | |
| 814; 739372122; | 2204 | 3592 | 4343 | n/a | n/a |
| NZ_JQHE01000003.1; | | | | | |
| 1627; 1628; 13/14 | | | | | |
| 815; 357386972; | 1627 | 2745 | n/a | n/a | n/a |
| NC_016109.1; 1629; | | | | | |
| 1630; 26/27 | | | | | |
| 816; 749295448; | n/a | 2965 | 4173 | n/a | n/a |
| NZ_CP006714.1; 1631; | | | | | |
| 1632; 20/21 | | | | | |
| 817; 260447107; | 1559 | 2651 | 3957 | n/a | n/a |
| NZ_GG703879.1; 1633; | | | | | |
| 1634; 20/21 | | | | | |
| 818; 260447107; | 1559 | 2651 | 3957 | n/a | n/a |
| NZ_GG703879.1; 1635; | | | | | |
| 1636; 13/14 | | | | | |
| 819; 260447107; | 1559 | 2651 | 3957 | n/a | n/a |
| NZ_GG703879.1; 1637; | | | | | |
| 1638; 20/21 | | | | | |
| 820; 260447107; | 1559 | 2651 | 3957 | n/a | n/a |
| NZ_GG703879.1; 1639; | | | | | |
| 1640; 20/21 | | | | | |
| 821; 260447107; | 1559 | 2651 | 3957 | n/a | n/a |
| NZ_GG703879.1; 1641; | | | | | |
| 1642; 20/21 | | | | | |
| 822; 749295448; | n/a | 2397 | 3797 | n/a | n/a |
| NZ_CP006714.1; 1643; | | | | | |
| 1644; 20/21 | | | | | |
| 823; 759443001; | 1442 | n/a | n/a | 2504 | n/a |
| NZ_JDUV01000004.1; | | | | | |
| 1645; 1646; 20/21 | | | | | |
| 824; 67639376; | 1460 | 2531 | n/a | n/a | n/a |
| NZ_AAHO01000116.1; | | | | | |
| 1647; 1648; 28/29 | | | | | |
| 825; 483969755; | 1703 | 2857 | n/a | n/a | n/a |
| NZ_KB891596.1; 1649; | | | | | |
| 1650; 34/35 | | | | | |
| 826; 484026206; | 1684 | 3337 | 4094 | n/a | n/a |
| NZ_ANBH01000093.1; | | | | | |
| 1651; 1652; 31/32 | | | | | |
| 827; 919546672; | n/a | 3630 | n/a | n/a | n/a |
| NZ_JOEL01000066.1; | | | | | |
| 1653; 1654; 31/32 | | | | | |
| 828; 486399859; | 2160 | 2885 | 4130 | n/a | n/a |
| NZ_KB912942.1; 1655; | | | | | |
| 1656; 24/25 | | | | | |
| 829; 815864238; | n/a | 3623 | 4437 | n/a | n/a |
| NZ_LAJC01000053.1; | | | | | |
| 1657; 1658; 22/23 | | | | | |
| 830; 879201007; | 1380 | 2427 | 3820 | n/a | n/a |
| CKIK01000005.1; 1659; | | | | | |
| 1660; 19/20 | | | | | |
| 831; 655414006; | n/a | 3053 | n/a | n/a | 4225 |
| NZ_AUBE01000007.1; | | | | | |
| 1661; 1662; 57/58 | | | | | |
| 832; 749611130; | 2225 | 3331 | n/a | n/a | n/a |
| NZ_CDHL01000044.1; | | | | | |
| 1663; 1664; 22/23 | | | | | |
| 833; 664084661; | 1849 | 3535 | 4480 | n/a | n/a |
| NZ_JOED01000001.1; | | | | | |
| 1665; 1666; 33/34 | | | | | |
| 834; 256374160; | 1650 | 2778 | n/a | n/a | n/a |
| NC_013093.1; 1667; | | | | | |
| 1668; 40/41 | | | | | |
| 835; 822214995; | n/a | 3459 | n/a | n/a | n/a |
| NZ_CP007699.1; 1669; | | | | | |
| 1670; 73/74 | | | | | |
| 836; 664084661; | 1849 | 3533 | 4479 | n/a | n/a |
| NZ_JOED01000001.1; | | | | | |
| 1671; 1672; 33/34 | | | | | |
| 837; 357386972; | 1924 | 2746 | n/a | n/a | n/a |
| NC_016109.1; 1673; | | | | | |
| 1674; 26/27 | | | | | |
| 838; 822214995; | n/a | 2387 | n/a | n/a | n/a |
| NZ_CP007699.1; 1675; | | | | | |
| 1676; 73/74 | | | | | |
| 839; 558542923; | n/a | 3128 | n/a | n/a | 4150 |
| AWQW01000003.1; | | | | | |
| 1677; 1678; 19/20 | | | | | |
| 840; 671535174; | 1909 | 3390 | n/a | n/a | n/a |
| NZ_JOHY01000024.1; | | | | | |
| 1679; 1680; 29/30 | | | | | |
| 841; 671472153; | n/a | n/a | n/a | n/a | n/a |
| NZ_JOFR01000001.1; | | | | | |
| 1681; 1682; 21/22 | | | | | |
| 842; 919546534; | n/a | 3628 | n/a | n/a | n/a |
| NZ_JOEL01000027.1; | | | | | |
| 1683; 1684; 33/34 | | | | | |
| 843; 665530468; | n/a | 3581 | n/a | n/a | n/a |
| NZ_JOCD01000052.1; | | | | | |
| 1685; 1686; 26/27 | | | | | |
| 844; 563312125; | 1420 | 2475 | n/a | n/a | n/a |
| AYTZ01000052.1; | | | | | |
| 1687; 1688; 31/32 | | | | | |
| 845; 654993549; | n/a | 3265 | n/a | n/a | n/a |
| NZ_AZVE01000016.1; | | | | | |
| 1689; 1690; 29/30 | | | | | |
| 846; 663180071; | 1987 | 3081 | n/a | n/a | n/a |
| NZ_JOBE01000043.1; | | | | | |
| 1691; 1692; 28/29 | | | | | |
| 847; 664256887; | n/a | 3578 | n/a | n/a | 4499 |
| NZ_JODF01000036.1; | | | | | |
| 1693; 1694; 51/52 | | | | | |
| 848; 558542923; | n/a | 2473 | n/a | n/a | 3851 |
| AWQW01000003.1; | | | | | |
| 1695; 1696; 19/20 | | | | | |
| 849; 906344341; | 2247 | 3515 | 4472 | n/a | n/a |
| NZ_LFXA01000009.1; | | | | | |
| 1697; 1698; 25/26 | | | | | |
| 850; 563312125; | 1440 | 2502 | n/a | n/a | n/a |
| AYTZ01000052.1; | | | | | |
| 1699; 1700; 31/32 | | | | | |
| 851; 486330103; | 1724 | 2884 | n/a | n/a | n/a |
| NZ_KB913032.1; 1701; | | | | | |
| 1702; 31/32 | | | | | |
| 852; 663693444; | n/a | 3093 | n/a | n/a | n/a |
| NZ_JOFI01000027.1; | | | | | |
| 1703; 1704; 31/32 | | | | | |
| 853; 664299296; | 2198 | 3110 | 4282 | n/a | n/a |
| NZ_JOIK01000008.1; | | | | | |
| 1705; 1706; 25/26 | | | | | |
| 854; 925610911; | 1470 | 2542 | n/a | n/a | n/a |
| LGEE01000058.1; 1707; | | | | | |
| 1708; 28/29 | | | | | |
| 855; 663317502; | 2192 | 3085 | 4500 | n/a | n/a |
| NZ_JNZO01000008.1; | | | | | |
| 1709; 1710; 40/41 | | | | | |
| 856; 384145136; | n/a | 2714 | n/a | n/a | 4004 |
| NC_017186.1; 1711; | | | | | |
| 1712; 53/54 | | | | | |
| 857; 925610911; | 2259 | 3653 | n/a | n/a | n/a |
| LGEE01000058.1; 1713; | | | | | |
| 1714; 28/29 | | | | | |
| 858; 486324513; | 1715 | 2874 | n/a | n/a | n/a |
| NZ_KB913024.1; 1715; | | | | | |
| 1716; 37/38 | | | | | |
| 859; 759802587; | n/a | 3398 | n/a | n/a | 4512 |
| NZ_CP009438.1; 1717; | | | | | |
| 1718; 50/51 | | | | | |
| 860; 921220646; | 2069 | 3636 | n/a | n/a | n/a |
| NZ_JXYI02000059.1; | | | | | |
| 1719; 1720; 27/28 | | | | | |
| 861; 818476494; | n/a | 2391 | n/a | n/a | 3793 |
| KP274854.1; 1721; | | | | | |
| 1722; 53/54 | | | | | |
| 862; 365866490; | n/a | 3547 | n/a | n/a | n/a |
| NZ_AGSW01000226.1; | | | | | |
| 1723; 1724; 28/29 | | | | | |
| 863; 365866490; | n/a | 2446 | n/a | n/a | n/a |
| NZ_AGSW01000226.1; | | | | | |
| 1725; 1726; 28/29 | | | | | |
| 864; 937182893; | 2280 | 3688 | n/a | n/a | n/a |
| NZ_LFCW01000001.1; | | | | | |
| 1727; 1728; 31/32 | | | | | |
| 865; 484022237; | 1683 | 2831 | n/a | n/a | n/a |
| NZ_ANBD01000111.1; | | | | | |
| 1729; 1730; 22/23 | | | | | |
| 866; 747653426; | n/a | 2425 | n/a | n/a | 3818 |
| CDME01000011.1; | | | | | |
| 1731; 1732; 35/36 | | | | | |
| 867; 365866490; | n/a | 3569 | n/a | n/a | n/a |
| NZ_AGSW01000226.1; | | | | | |
| 1733; 1734; 28/29 | | | | | |
| 868; 926317398; | 2258 | 3652 | n/a | n/a | n/a |
| NZ_LGDO01000015.1; | | | | | |
| 1735; 1736; 27/28 | | | | | |
| 869; 746616581; | 1351 | 2383 | n/a | n/a | n/a |
| KF954512.1; 1737; | | | | | |
| 1738; 13/14 | | | | | |
| 870; 749658562; | 2019 | 3616 | n/a | n/a | n/a |
| NZ_CP010519.1; 1739; | | | | | |
| 1740; 29/30 | | | | | |
| 871; 487404592; | n/a | 2888 | n/a | n/a | 4132 |
| NZ_ARVW01000001.1; | | | | | |
| 1741; 1742; 41/42 | | | | | |
| 872; 389759651; | 1397 | 2449 | n/a | n/a | n/a |
| NZ_AJXS01000437.1; | | | | | |
| 1743; 1744; 26/27 | | | | | |
| 873; 930491003; | n/a | 3682 | n/a | n/a | 4542 |
| NZ_LJCU01000287.1; | | | | | |
| 1745; 1746; 29/30 | | | | | |
| 874; 484016556; | 1681 | 2986 | n/a | n/a | n/a |
| NZ_ANAX01000372.1; | | | | | |
| 1747; 1748; 27/28 | | | | | |
| 875; 433601838; | n/a | 3354 | n/a | n/a | 4045 |
| NC_019673.1; 1749; | | | | | |
| 1750; 44/45 | | | | | |
| 876; 483974021; | 1705 | 3270 | n/a | n/a | n/a |
| NZ_KB891893.1; 1751; | | | | | |
| 1752; 23/24 | | | | | |
| 877; 930491003; | n/a | 2545 | n/a | n/a | 3887 |
| NZ_LJCU01000287.1; | | | | | |
| 1753; 1754; 29/30 | | | | | |
| 878; 749658562; | 1352 | 2384 | n/a | n/a | n/a |
| NZ_CP010519.1; 1755; | | | | | |
| 1756; 29/30 | | | | | |
| 879; 759755931; | 2188 | 3396 | n/a | n/a | n/a |
| NZ_JAIY01000003.1; | | | | | |
| 1757; 1758; 27/28 | | | | | |
| 880; 484007204; | 1678 | 2821 | 4086 | n/a | n/a |
| NZ_ANAC01000034.1; | | | | | |
| 1759; 1760; 25/26 | | | | | |
| 881; 433601838; | n/a | 2416 | n/a | n/a | 3811 |
| NC_019673.1; 1761; | | | | | |
| 1762; 44/45 | | | | | |
| 882; 254387191; | 1554 | 3542 | n/a | n/a | n/a |
| NZ_DS570483.1; 1763; | | | | | |
| 1764; 27/28 | | | | | |
| 883; 345007457; | 1623 | 2740 | 4024 | n/a | n/a |
| NC_015951.1; 1765; | | | | | |
| 1766; 38/39 | | | | | |
| 884; 297558985; | 2138 | 2713 | n/a | n/a | n/a |
| NC_014210.1; 1767; | | | | | |
| 1768; 27/28 | | | | | |
| 885; 927872504; | 2270 | 3457 | 4439 | n/a | n/a |
| NZ_CP011452.2; 1769; | | | | | |
| 1770; 12/13 | | | | | |
| 886; 970555001; | 2334 | 3759 | 4593 | n/a | n/a |
| NZ_LNRZ01000006.1; | | | | | |
| 1771; 1772; 25/26 | | | | | |
| 887; 960424655; | 2331 | 3754 | 4589 | n/a | n/a |
| NZ_CYUE01000025.1; | | | | | |
| 1773; 1774; 21/22 | | | | | |
| 888; 483994857; | 1723 | 2989 | 4129 | n/a | n/a |
| NZ_KB893599.1; 1775; | | | | | |
| 1776; 33/34 | | | | | |
| 889; 817524426; | 2093 | 3452 | 4435 | n/a | n/a |
| NZ_CP010429.1; 1777; | | | | | |
| 1778; 33/34 | | | | | |
| 890; 970361514; | 1481 | 2556 | 3896 | n/a | n/a |
| LOCL01000028.1; 1779; | | | | | |
| 1780; 21/22 | | | | | |
| 891; 970574347; | 2335 | 3760 | 4008 | n/a | n/a |
| NZ_LNZF01000001.1; | | | | | |
| 1781; 1782; 20/21 | | | | | |
| 892; 970574347; | 1610 | 3758 | 4373 | n/a | n/a |
| NZ_LNZF01000001.1; | | | | | |
| 1783; 1784; 20/21 | | | | | |
| 893; 961447255; | 1365 | 2402 | 3799 | n/a | n/a |
| CP013653.1; 1785; | | | | | |
| 1786; 20/21 | | | | | |
| 894; 283814236; | 1329 | 2354 | 3766 | n/a | n/a |
| CP001769.1; 1787; | | | | | |
| 1788; 35/36 | | | | | |
| 895; 746187486; | n/a | 3304 | 4506 | n/a | n/a |
| NZ_MSY01000011.1; | | | | | |
| 1789; 1790; 12/13 | | | | | |
| 896; 960412751; | 2330 | 3753 | 4588 | n/a | n/a |
| NZ_LN881722.1; 1791; | | | | | |
| 1792; 19/20 | | | | | |
| 897; 970293907; | n/a | 2555 | n/a | n/a | n/a |
| LOHP01000076.1; 1793; | | | | | |
| 1794; 22/23 | | | | | |
| 898; 943388237; | 2295 | 3704 | 4547 | n/a | n/a |
| NZ_LIQD01000001.1; | | | | | |
| 1795; 1796; 21/22 | | | | | |
| 899; 944415035; | n/a | 3719 | n/a | n/a | 4562 |
| NZ_LIRG01000370.1; | | | | | |
| 1797; 1798; 51/52 | | | | | |
| 900; 944005810; | 2304 | 3714 | 4557 | n/a | n/a |
| NZ_LIQT01000057.1; | | | | | |
| 1799; 1800; 28/29 | | | | | |
| 901; 944020089; | n/a | 3716 | n/a | n/a | 4559 |
| NZ_LIPR01000230.1; | | | | | |
| 1801; 1802; 51/52 | | | | | |
| 902; 944020089; | n/a | 3718 | n/a | n/a | 4561 |
| NZ_LIPR01000230.1; | | | | | |
| 1803; 1804; 51/52 | | | | | |
| 903; 943922567; | n/a | 3711 | 4554 | n/a | n/a |
| NZ_LIQU01000247.1; | | | | | |
| 1805; 1806; 29/30 | | | | | |
| 904; 969919061; | 2333 | 3756 | 4591 | n/a | n/a |
| NZ_LDRR01000065.1; | | | | | |
| 1807; 1808; 21/22 | | | | | |
| 905; 969919061; | 2333 | 3756 | 4591 | n/a | n/a |
| NZ_LDRR01000065.1; | | | | | |
| 1809; 1810; 21/22 | | | | | |
| 906; 969919061; | 2333 | 3757 | 4592 | n/a | n/a |
| NZ_LDRR01000065.1; | | | | | |
| 1811; 1812; 21/22 | | | | | |
| 907; 969919061; | 2333 | 3757 | 4592 | n/a | n/a |
| NZ_LDRR01000065.1; | | | | | |
| 1813; 1814; 21/22 | | | | | |
| 908; 969919061; | 2332 | 3755 | 4590 | n/a | n/a |
| NZ_LDRR01000065.1; | | | | | |
| 1815; 1816; 21/22 | | | | | |
| 909; 969919061; | 2332 | 3755 | 4590 | n/a | n/a |
| NZ_LDRR01000065.1; | | | | | |
| 1817; 1818; 21/22 | | | | | |
| 910; 483454700; | 1722 | 2987 | 4128 | n/a | n/a |
| NZ_KB903974.1; 1819; | | | | | |
| 1820; 31/32 | | | | | |
| 911; 970579907; | 2336 | 3761 | n/a | n/a | n/a |
| NZ_KQ759763.1; 1821; | | | | | |
| 1822; 27/28 | | | | | |
| 912; 947401208; | 2311 | 3725 | n/a | n/a | n/a |
| NZ_LMKW01000010.1; | | | | | |
| 1823; 1824; 20/21 | | | | | |
| 913; 941965142; | 2293 | 3702 | n/a | n/a | n/a |
| NZ_LKIT01000002.1; | | | | | |
| 1825; 1826; 26/27 | | | | | |
| 914; 941965142; | 2293 | 3702 | n/a | n/a | n/a |
| NZ_LKIT01000002.1; | | | | | |
| 1827; 1828; 29/30 | | | | | |
| 915; 312193897; | n/a | 2720 | n/a | n/a | n/a |
| NC_014666.1; 1829; | | | | | |
| 1830; 35/36 | | | | | |
| 916; 736762362; | 1939 | 3187 | 4323 | n/a | n/a |
| NZ_CCDN010000009.1; | | | | | |
| 1831; 1832; 19/20 | | | | | |
| 917; 651596980; | 1784 | 2997 | 4190 | n/a | n/a |
| NZ_AXVB01000011.1; | | | | | |
| 1833; 1834; 19/20 | | | | | |
| 918; 850356871; | 2110 | 3482 | 4454 | n/a | n/a |
| NZ_LDWN01000016.1; | | | | | |
| 1835; 1836; 11/12 | | | | | |
| 919; 924654439; | 2253 | 3644 | 4523 | n/a | n/a |
| NZ_LIUS01000003.1; | | | | | |
| 1837; 1838; 19/20 | | | | | |
| 920; 238801497; | 1706 | 2620 | 3897 | n/a | n/a |
| NZ_CM000745.1; 1839; | | | | | |
| 1840; 19/20 | | | | | |
| 921; 651983111; | 2171 | 3001 | 4192 | n/a | n/a |
| NZ_KE387239.1; 1841; | | | | | |
| 1842; 23124 | | | | | |
| 922; 727343482; | 1706 | 2593 | 3897 | n/a | n/a |
| NZ_JMQD01000030.1; | | | | | |
| 1843; 1844; 19/20 | | | | | |
| 923; 423557538; | 1499 | 2580 | 3913 | n/a | n/a |
| NZ_JH792114.1; 1845; | | | | | |
| 1846; 19/20 | | | | | |
| 924; 727343482; | 1706 | 3175 | 3897 | n/a | n/a |
| NZ_JMQD01000030.1; | | | | | |
| 1847; 1848; 19/20 | | | | | |
| 925; 727343482; | 1486 | 2789 | 4066 | n/a | n/a |
| NZ_JMQD01000030.1; | | | | | |
| 1849; 1850; 19/20 | | | | | |
| 926; 727343482; | 1486 | 2785 | 4066 | n/a | n/a |
| NZ_JMQD01000030.1; | | | | | |
| 1851; 1852; 19/20 | | | | | |
| 927; 727343482; | 1486 | 2786 | 4067 | n/a | n/a |
| NZ_JMQD01000030.1; | | | | | |
| 1853; 1854; 19/20 | | | | | |
| 928; 727343482; | 1762 | 2961 | 3897 | n/a | n/a |
| NZ_JMQD01000030.1; | | | | | |
| 1855; 1856; 19/20 | | | | | |
| 929; 487368297; | 1718 | 2877 | 4122 | n/a | n/a |
| NZ_KB910953.1; 1857; | | | | | |
| 1858; 19/20 | | | | | |
| 930; 423614674; | 1488 | 2562 | 3904 | n/a | n/a |
| NZ_JH792165.1; 1859; | | | | | |
| 1860; 19/20 | | | | | |
| 931; 727343482; | 1502 | 2584 | 3916 | n/a | n/a |
| NZ_JMQD01000030.1; | | | | | |
| 1861; 1862; 19/20 | | | | | |
| 932; 727343482; | 1486 | 2788 | 4066 | n/a | n/a |
| NZ_JMQD01000030.1; | | | | | |
| 1863; 1864; 19/20 | | | | | |
| 933; 727343482; | 1486 | 2583 | 3897 | n/a | n/a |
| NZ_JMQD01000030.1; | | | | | |
| 1865; 1866; 19/20 | | | | | |
| 934; 736214556; | 1935 | 3183 | 4321 | n/a | n/a |
| NZ_KN360955.1; 1867; | | | | | |
| 1868; 19/20 | | | | | |
| 935; 507060152; | 1653 | 2787 | 4068 | n/a | n/a |
| NZ_KB976714.1; 1869; | | | | | |
| 1870; 19/20 | | | | | |
| 936; 727343482; | 1486 | 2570 | 3897 | n/a | n/a |
| NZ_JMQD01000030.1; | | | | | |
| 1871; 1872; 19/20 | | | | | |
| 937; 737456981; | 1948 | 3201 | 4502 | n/a | n/a |
| NZ_KN050811.1; 1873; | | | | | |
| 1874; 11/12 | | | | | |
| 938; 880954155; | 2118 | 3491 | 4462 | n/a | n/a |
| NZ_JVPL01000109.1; | | | | | |
| 1875; 1876; 19/20 | | | | | |
| 939; 751619763; | 2026 | 3348 | 4385 | n/a | n/a |
| NZ_JXRP01000009.1; | | | | | |
| 1877; 1878; 13/14 | | | | | |
| 940; 727343482; | 1486 | 3384 | 3897 | n/a | n/a |
| NZ_JMQD01000030.1; | | | | | |
| 1879; 1880; 19/20 | | | | | |
| 941; 806951735; | 1490 | 2561 | 3905 | n/a | n/a |
| NZ_JSFD01000011.1; | | | | | |
| 1881; 1882; 19/20 | | | | | |
| 942; 736160933; | 1934 | 3182 | 4320 | n/a | n/a |
| NZ_JQMI01000015.1; | | | | | |
| 1883; 1884; 19/20 | | | | | |
| 943; 736160933; | 1934 | 3182 | 4320 | n/a | n/a |
| NZ_JQMI01000015.1; | | | | | |
| 1885; 1886; 19/20 | | | | | |
| 944; 872696015; | 2115 | 3485 | 4460 | n/a | n/a |
| NZ_LABO01000035.1; | | | | | |
| 1887; 1888; 19/20 | | | | | |
| 945; 806951735; | 1493 | 2572 | 3905 | n/a | n/a |
| NZ_JSFD01000011.1; | | | | | |
| 1889; 1890; 19/20 | | | | | |
| 946; 806951735; | 2087 | 3444 | 3905 | n/a | n/a |
| NZ_JSFD01000011.1; | | | | | |
| 1891; 1892; 19/20 | | | | | |
| 947; 950170460; | 2323 | 3742 | 4580 | n/a | n/a |
| NZ_LMTA01000046.1; | | | | | |
| 1893; 1894; 19/20 | | | | | |
| 948; 872696015; | 1498 | 2585 | 3917 | n/a | n/a |
| NZ_LABO01000035.1; | | | | | |
| 1895; 1896; 19/20 | | | | | |
| 949; 163938013; | 1596 | 2695 | 3991 | n/a | n/a |
| NC_010184.1; 1897; | | | | | |
| 1898; 13/14 | | | | | |
| 950; 872696015; | 1498 | 2782 | 4064 | n/a | n/a |
| NZ_LABO01000035.1; | | | | | |
| 1899; 1900; 19/20 | | | | | |
| 951; 238801491; | 1487 | 2560 | 3902 | n/a | n/a |
| NZ_CM000739.1; 1901; | | | | | |
| 1902; 19/20 | | | | | |
| 952; 657629081; | | 1837 | 3068 | 4237 | n/a |
| NZ_AYPV01000024.1; | | | | | |
| 1903; 1904; 19/20 | | | | | |
| 953; 507035131; | 1652 | 2783 | 4065 | n/a | n/a |
| NZ_KB976800.1; 1905; | | | | | |
| 1906; 19/20 | | | | | |
| 954; 737576092; | 1951 | 3205 | 4331 | n/a | n/a |
| NZ_JRNX01000441.1; | | | | | |
| 1907; 1908; 3/4 | | | | | |
| 955; 947983982; | 2321 | 3737 | 4578 | n/a | n/a |
| NZ_LMRV01000044.1; | | | | | |
| 1909; 1910; 11/12 | | | | | |
| 956; 946400391; | 2324 | 3743 | 4581 | n/a | n/a |
| LMRY01000003.1; | | | | | |
| 1911; 1912; 23/24 | | | | | |
| 957; 423456860; | 1495 | 2568 | 3906 | n/a | n/a |
| NZ_JH791975.1; 1913; | | | | | |
| 1914; 19/20 | | | | | |
| 958; 514340871; | 1494 | 2575 | 3908 | n/a | n/a |
| NZ_KE150045.1; 1915; | | | | | |
| 1916; 19/20 | | | | | |
| 959; 946400391; | 1480 | 2554 | 3895 | n/a | n/a |
| LMRY01000003.1; | | | | | |
| 1917; 1918; 23/24 | | | | | |
| 960; 655103160; | 1825 | 3046 | 4220 | n/a | n/a |
| NZ_JMLS01000021.1; | | | | | |
| 1919; 1920; 11/12 | | | | | |
| 961; 910095435; | 1930 | 2577 | 3910 | n/a | n/a |
| NZ_JNLY01000005.1; | | | | | |
| 1921; 1922; 19/20 | | | | | |
| 962; 910095435; | 1931 | 2581 | 3910 | n/a | n/a |
| NZ_JNLY01000005.1; | | | | | |
| 1923; 1924; 19/20 | | | | | |
| 963; 910095435; | 1931 | 3519 | 4474 | n/a | n/a |
| NZ_JNLY01000005.1; | | | | | |
| 1925; 1926; 19/20 | | | | | |
| 964; 910095435; | 1930 | 3174 | 3910 | n/a | n/a |
| NZ_JNLY01000005.1; | | | | | |
| 1927; 1928; 19/20 | | | | | |
| 965; 922780240; | 2248 | 3638 | 4521 | n/a | n/a |
| NZ_LIGH01000001.1; | | | | | |
| 1929; 1930; 21/22 | | | | | |
| 966; 929005248; | 2275 | 3676 | 4539 | n/a | n/a |
| NZ_LGHP01000003.1; | | | | | |
| 1931; 1932; 21/22 | | | | | |
| 967; 767005659; | n/a | 3428 | n/a | n/a | n/a |
| NZ_CP010976.1; 1933; | | | | | |
| 1934; 19/20 | | | | | |
| 968; 507017505; | 1651 | 2780 | 4063 | n/a | n/a |
| NZ_KB976530.1; 1935; | | | | | |
| 1936; 19/20 | | | | | |
| 969; 423520617; | 1498 | 2579 | 3912 | n/a | n/a |
| NZ_JH792148.1; 1937; | | | | | |
| 1938; 19/20 | | | | | |
| 970; 910095435; | 1930 | 2574 | 4317 | n/a | n/a |
| NZ_JNLY01000005.1; | | | | | |
| 1939; 1940; 19/20 | | | | | |
| 971; 507020427; | 1497 | 2578 | 3911 | n/a | n/a |
| NZ_KB976152.1; 1941; | | | | | |
| 1942; 19/20 | | | | | |
| 972; 910095435; | 1488 | 2565 | 3900 | n/a | n/a |
| NZ_JNLY01000005.1; | | | | | |
| 1943; 1944; 19/20 | | | | | |
| 973; 483299154; | 1672 | 2813 | 4083 | n/a | n/a |
| NZ_AMGD01000001.1; | | | | | |
| 1945; 1946; 19/20 | | | | | |
| 974; 483299154; | 1672 | 2813 | 4083 | n/a | n/a |
| NZ_AMGD01000001.1; | | | | | |
| 1947; 1948; 19/20 | | | | | |
| 975; 910095435; | 1488 | 2784 | 3900 | n/a | n/a |
| NZ_JNLY01000005.1; | | | | | |
| 1949; 1950; 19/20 | | | | | |
| 976; 423468694; | 1496 | 2576 | 3909 | n/a | n/a |
| NZ_JH804628.1; 1951; | | | | | |
| 1952; 19/20 | | | | | |
| 977; 507020427; | 1491 | 2569 | 3898 | n/a | n/a |
| NZ_KB976152.1; 1953; | | | | | |
| 1954; 19/20 | | | | | |
| 978; 910095435; | 1488 | 2564 | 3900 | n/a | n/a |
| NZ_JNLY01000005.1; | | | | | |
| 1955; 1956; 19/20 | | | | | |
| 979; 910095435; | 1488 | 2566 | 3900 | n/a | n/a |
| NZ_JNLY01000005.1; | | | | | |
| 1957; 1958; 19/20 | | | | | |
| 980; 423609285; | 1501 | 2582 | 3915 | n/a | n/a |
| NZ_JH792232.1; 1959; | | | | | |
| 1960; 19/20 | | | | | |
| 981; 947966412; | 2320 | 3736 | 4576 | n/a | n/a |
| NZ_LMSD01000001.1; | | | | | |
| 1961; 1962; 19/20 | | | | | |
| 982; 947966412; | 2320 | 3736 | 4576 | n/a | n/a |
| NZ_LMSD01000001.1; | | | | | |
| 1963; 1964; 19/20 | | | | | |
| 983; 507020427; | 1497 | 2781 | 3911 | n/a | n/a |
| NZ_KB976152.1; 1965; | | | | | |
| 1966; 19/20 | | | | | |
| 984; 910095435; | 1489 | 2567 | 3899 | n/a | n/a |
| NZ_JNLY01000005.1; | | | | | |
| 1967; 1968; 19/20 | | | | | |
| 985; 950280827; | 2325 | 3744 | 4583 | n/a | n/a |
| NZ_LMSJ01000026.1; | | | | | |
| 1969; 1970; 19/20 | | | | | |
| 986; 656249802; | 1833 | 3062 | 4230 | n/a | n/a |
| NZ_AUGY01000047.1; | | | | | |
| 1971; 1972; 19/20 | | | | | |
| 987; 238801471; | 1500 | 2573 | 3914 | n/a | n/a |
| NZ_CM000719.1; 1973; | | | | | |
| 1974; 19/20 | | | | | |
| 988; 485048843; | 1711 | 2867 | 4111 | n/a | n/a |
| NZ_ALEG01000067.1; | | | | | |
| 1975; 1976; 19/20 | | | | | |
| 989; 647636934; | 1773 | 2979 | 4182 | n/a | n/a |
| NZ_JANV01000106.1; | | | | | |
| 1977; 1978; 19/20 | | | | | |
| 990; 910095435; | 1488 | 2563 | 3901 | n/a | n/a |
| NZ_JNLY01000005.1; | | | | | |
| 1979; 1980; 19/20 | | | | | |
| 991; 817541164; | 2092 | 3454 | 4438 | n/a | n/a |
| NZ_LATZ01000026.1; | | | | | |
| 1981; 1982; 19/20 | | | | | |
| 992; 488570484; | 2032 | 2770 | 4057 | n/a | n/a |
| NC_021171.1; 1983; | | | | | |
| 1984; 19/20 | | | | | |
| 993; 914730676; | 2149 | 3540 | 4481 | n/a | n/a |
| NZ_LFQJ01000032.1; | | | | | |
| 1985; 1986; 19/20 | | | | | |
| 994; 928874573; | 2052 | 3670 | 4404 | n/a | n/a |
| NZ_LIXL01000208.1; | | | | | |
| 1987; 1988; 19/20 | | | | | |
| 995; 928874573; | 2052 | 3670 | 4404 | n/a | n/a |
| NZ_LIXL01000208.1; | | | | | |
| 1989; 1990; 19/20 | | | | | |
| 996; 655165706; | 1969 | 3050 | 4222 | n/a | n/a |
| NZ_KE383843.1; 1991; | | | | | |
| 1992; 11/12 | | | | | |
| 997; 656245934; | 1832 | 3060 | 4229 | n/a | n/a |
| NZ_KE383845.1; 1993; | | | | | |
| 1994; 19/20 | | | | | |
| 998; 928874573; | 2052 | 3385 | 4404 | n/a | n/a |
| NZ_LIXL01000208.1; | | | | | |
| 1995; 1996; 19/20 | | | | | |
| 999; 928874573; | 2052 | 3385 | 4404 | n/a | n/a |
| NZ_LIXL01000208.1; | | | | | |
| 1997; 1998; 19/20 | | | | | |
| 1000; 924371245; | n/a | 3642 | n/a | n/a | n/a |
| NZ_LITP01000001.1; | | | | | |
| 1999; 2000; 19/20 | | | | | |
| 1001; 654948246; | 1819 | 3040 | 4216 | n/a | n/a |
| NZ_KI632505.1; 2001; | | | | | |
| 2002; 11/12 | | | | | |
| 1002; 657210762; | 2051 | 2750 | 4033 | n/a | n/a |
| NZ_AXZS01000018.1; | | | | | |
| 2003; 2004; 19/20 | | | | | |
| 1003; 571146044; | 1747 | 2916 | 4153 | n/a | n/a |
| BAUW01000006.1; | | | | | |
| 2005; 2006; 19/20 | | | | | |
| 1004; 935460965; | n/a | 3685 | n/a | n/a | n/a |
| NZ_LIUT01000006.1; | | | | | |
| 2007; 2008; 19/20 | | | | | |
| 1005; 651516582; | 2175 | 2995 | 4189 | n/a | n/a |
| NZ_JAEK01000001.1; | | | | | |
| 2009; 2010; 19/20 | | | | | |
| 1006; 657210762; | 1820 | 3042 | 4217 | n/a | n/a |
| NZ_AXZS01000018.1; | | | | | |
| 2011; 2012; 19/20 | | | | | |
| 1007; 657210762; | 2105 | 3476 | 4448 | n/a | n/a |
| NZ_AXZS01000018.1; | | | | | |
| 2013; 2014; 19/20 | | | | | |
| 1008; 723602665; | 1929 | 3173 | 4315 | n/a | n/a |
| NZ_JPIE01000001.1; | | | | | |
| 2015; 2016; 19/20 | | | | | |
| 1009; 657210762; | 1834 | 3065 | 4233 | n/a | n/a |
| NZ_AXZS01000018.1; | | | | | |
| 2017; 2018; 19/20 | | | | | |
| 1010; 933903534; | 1475 | 2549 | 3891 | n/a | n/a |
| LIXZ01000017.1; 2019; | | | | | |
| 2020; 11/12 | | | | | |
| 1011; 654954291; | n/a | 3041 | n/a | n/a | n/a |
| NZ_JAEO01000006.1; | | | | | |
| 2021; 2022; 19/20 | | | | | |
| 1012; 238801472; | 1482 | 2559 | 4316 | n/a | n/a |
| NZ_CM000720.1; 2023; | | | | | |
| 2024; 11/12 | | | | | |
| 1013; 651516582; | 2175 | 2995 | 4189 | n/a | n/a |
| NZ_JAEK01000001.1; | | | | | |
| 2025; 2026; 19/20 | | | | | |
| 1014; 910095435; | 1340 | 2369 | 3776 | n/a | n/a |
| NZ_JNLY01000005.1; | | | | | |
| 2027; 2028; 19/20 | | | | | |
| 1015; 403048279; | n/a | 2671 | n/a | n/a | n/a |
| NZ_HE610988.1; 2029; | | | | | |
| 2030; 19/20 | | | | | |
| 1016; 750677319; | 2222 | 3339 | 4509 | n/a | n/a |
| NZ_CBQR020000171.1; | | | | | |
| 2031; 2032; 20/21 | | | | | |
| 1017; 849078078; | 2109 | 3481 | 4453 | n/a | n/a |
| NZ_LFJO01000006.1; | | | | | |
| 2033; 2034; 18/19 | | | | | |
| 1018; 890672806; | 1712 | 3329 | 4112 | n/a | n/a |
| NZ_CP011974.1; 2035; | | | | | |
| 2036; 0/1 | | | | | |
| 1019; 890672806; | 1712 | 3446 | 4112 | n/a | n/a |
| NZ_CP011974.1; 2037; | | | | | |
| 2038; 0/1 | | | | | |
| 1020; 727078508; | n/a | 2514 | n/a | n/a | n/a |
| JRNV01000046.1; 2039; | | | | | |
| 2040; 19/20 | | | | | |
| 1021; 749299172; | 1995 | 3278 | 4363 | n/a | n/a |
| NZ_CP009241.1; 2041; | | | | | |
| 2042; 19/20 | | | | | |
| 1022; 652787974; | 2169 | 3015 | 4203 | n/a | n/a |
| NZ_AUCP01000055.1; | | | | | |
| 2043; 2044; 50/51 | | | | | |
| 1023; 652787974; | 2169 | 3015 | 4203 | n/a | n/a |
| NZ_AUCP01000055.1; | | | | | |
| 2045; 2046; 23/24 | | | | | |
| 1024; 486346141; | 1717 | 2876 | 4121 | n/a | n/a |
| NZ_KB910518.1; 2047; | | | | | |
| 2048; 19/20 | | | | | |
| 1025; 951610263; | 2328 | 3747 | 4586 | n/a | n/a |
| NZ_LMBV01000004.1; | | | | | |
| 2049; 2050; 19/20 | | | | | |
| 1026; 354585485; | n/a | 2629 | n/a | n/a | n/a |
| NZ_AGIP01000020.1; | | | | | |
| 2051; 2052; 19/20 | | | | | |
| 1027; 940346731; | 2292 | 3701 | 4546 | n/a | n/a |
| NZ_LJCO01000107.1; | | | | | |
| 2053; 2054; 19/20 | | | | | |
| 1028; 880997761; | 2119 | 3492 | 4463 | n/a | n/a |
| NZ_JVDT01000118.1; | | | | | |
| 2055; 2056; 20/21 | | | | | |
| 1029; 880997761; | 1910 | 3132 | 4300 | n/a | n/a |
| NZ_JVDT01000118.1; | | | | | |
| 2057; 2058; 20/21 | | | | | |
| 1030; 746258261; | 2038 | 3369 | 4514 | n/a | n/a |
| NZ_JUEI01000069.1; | | | | | |
| 2059; 2060; 19/20 | | | | | |
| 1031; 849059098; | 2108 | 3480 | 4452 | n/a | n/a |
| NZ_LDUE01000022.1; | | | | | |
| 2061; 2062; 22/23 | | | | | |
| 1032; 746258261; | 2003 | 3309 | 4367 | n/a | n/a |
| NZ_JUEI01000069.1; | | | | | |
| 2063; 2064; 19/20 | | | | | |
| 1033; 754884871; | 2038 | 3375 | 4513 | n/a | n/a |
| NZ_CP009282.1; 2065; | | | | | |
| 2066; 19/20 | | | | | |
| 1034; 939708105; | 2291 | 3700 | 4545 | n/a | n/a |
| NZ_LN831205.1; 2067; | | | | | |
| 2068; 19/20 | | | | | |
| 1035; 738803633; | 1970 | 3225 | 4341 | n/a | n/a |
| NZ_ASPS01000022.1; | | | | | |
| 2069; 2070; 19/20 | | | | | |
| 1036; 754841195; | 2044 | 3374 | 4398 | n/a | n/a |
| NZ_CCDG010000069.1; | | | | | |
| 2071; 2072; 19/20 | | | | | |
| 1037; 754841195; | 2016 | 3326 | 4372 | n/a | n/a |
| NZ_CCDG010000069.1; | | | | | |
| 2073; 2074; 19/20 | | | | | |
| 1038; 751586078; | 2227 | 3346 | 4384 | n/a | n/a |
| NZ_JXRR01000001.1; | | | | | |
| 2075; 2076; 19/20 | | | | | |
| 1039; 970574347; | n/a | 2749 | 4032 | n/a | n/a |
| NZ_LNZF01000001.1; | | | | | |
| 2077; 2078; 20/21 | | | | | |
| 1040; 754841195; | 2041 | 3372 | 4395 | n/a | n/a |
| NZ_CCDG010000069.1; | | | | | |
| 2079; 2080; 19/20 | | | | | |
| 1041; 927084730; | 2267 | 3664 | 4534 | n/a | n/a |
| NZ_LITU01000050.1; | | | | | |
| 2081; 2082; 20/21 | | | | | |
| 1042; 738716739; | 1965 | 3220 | 4339 | n/a | n/a |
| NZ_ASPU01000015.1; | | | | | |
| 2083; 2084; 20/21 | | | | | |
| 1043; 738716739; | 1965 | 3220 | 4339 | n/a | n/a |
| NZ_ASPU01000015.1; | | | | | |
| 2085; 2086; 20/21 | | | | | |
| 1044; 639451286; | 1756 | 2956 | 4169 | n/a | n/a |
| NZ_AWUK01000007.1; | | | | | |
| 2087; 2088; 20/21 | | | | | |
| 1045; 738803633; | 1967 | 3223 | 4340 | n/a | n/a |
| NZ_ASPS01000022.1; | | | | | |
| 2089; 2090; 19/20 | | | | | |
| 1046; 484070054; | 1688 | 2838 | 4097 | n/a | n/a |
| NZ_ANHX01000029.1; | | | | | |
| 2091; 2092; 20/21 | | | | | |
| 1047; 484070054; | 1688 | 2838 | 4097 | n/a | n/a |
| NZ_ANHX01000029.1; | | | | | |
| 2093; 2094; 20/21 | | | | | |
| 1048; 754841195; | 2043 | 3373 | 4397 | n/a | n/a |
| NZ_CCDG010000069.1; | | | | | |
| 2095; 2096; 19/20 | | | | | |
| 1049; 948045460; | 2322 | 3739 | 4579 | n/a | n/a |
| NZ_LMFO01000023.1; | | | | | |
| 2097; 2098; 22/23 | | | | | |
| 1050; 652787974; | 2169 | 3016 | 4203 | n/a | n/a |
| NZ_AUCP01000055.1; | | | | | |
| 2099; 2100; 50/51 | | | | | |
| 1051; 652787974; | 2169 | 3016 | 4203 | n/a | n/a |
| NZ_AUCP01000055.1; | | | | | |
| 2101; 2102; 23/24 | | | | | |
| 1052; 924434005; | 1459 | 2530 | 3875 | n/a | n/a |
| LIYK01000027.1; 2103; | | | | | |
| 2104; 20/21 | | | | | |
| 1053; 926268043; | 2257 | 3648 | 4524 | n/a | n/a |
| NZ_CP012600.1; 2105; | | | | | |
| 2106; 19/20 | | | | | |
| 1054; 374605177; | 2023 | 2626 | 3940 | n/a | n/a |
| NZ_AHKH01000064.1; | | | | | |
| 2107; 2108; 19/20 | | | | | |
| 1055; 392955666; | 1541 | 2630 | 3943 | n/a | n/a |
| NZ_AKKV01000020.1; | | | | | |
| 2109; 2110; 19/20 | | | | | |
| 1056; 651937013; | 1786 | 2999 | 4191 | n/a | n/a |
| NZ_JHYI01000013.1; | | | | | |
| 2111; 2112; 19/20 | | | | | |
| 1057; 843088522; | 2106 | 3478 | 4449 | n/a | n/a |
| NZ_BBIW01000001.1; | | | | | |
| 2113; 2114; 17/18 | | | | | |
| 1058; 656245934; | 1832 | 3060 | 4229 | n/a | n/a |
| NZ_KE383845.1; 2115; | | | | | |
| 2116; 19/20 | | | | | |
| 1059; 651937013; | 1786 | 2999 | 4191 | n/a | n/a |
| NZ_JHYI01000013.1; | | | | | |
| 2117; 2118; 19/20 | | | | | |
| 1060; 430748349; | 1640 | 2767 | 4055 | n/a | n/a |
| NC_019897.1; 2119; | | | | | |
| 2120; 20/21 | | | | | |
| 1061; 947983982; | 2321 | 3737 | 4578 | n/a | n/a |
| NZ_LMRV01000044.1; | | | | | |
| 2121; 2122; 11/12 | | | | | |
| 1062; 749182744; | 2015 | 3596 | 4371 | n/a | n/a |
| NZ_CP009416.1; 2123; | | | | | |
| 2124; 19/20 | | | | | |
| 1063; 802929558; | 2235 | 3059 | 4228 | n/a | n/a |
| NZ_CP009933.1; 2125; | | | | | |
| 2126; 20/21 | | | | | |
| 1064; 550916528; | 1733 | 2898 | 4138 | n/a | n/a |
| NC_022571.1; 2127; | | | | | |
| 2128; 25/26 | | | | | |
| 1065; 950938054; | 2326 | 3745 | 3907 | n/a | n/a |
| NZ_CIHL01000007.1; | | | | | |
| 2129; 2130; 19/20 | | | | | |
| 1066; 571146044; | 1431 | 2490 | 3859 | n/a | n/a |
| BAUW01000006.1; | | | | | |
| 2131; 2132; 19/20 | | | | | |
| 1067; 571146044; | 1431 | 2490 | 3859 | n/a | n/a |
| BAUW01000006.1; | | | | | |
| 2133; 2134; 19/20 | | | | | |
| 1068; 427733619; | 2221 | 2760 | 4048 | n/a | n/a |
| NC_019678.1; 2135; | | | | | |
| 2136; 22/23 | | | | | |
| 1069; 657706549; | 1838 | 3070 | n/a | n/a | n/a |
| NZ_JNLM01000001.1; | | | | | |
| 2137; 2138; 44/45 | | | | | |
| 1070; 514429123; | 1654 | 2791 | 4484 | n/a | n/a |
| NZ_KE332377.1; 2139; | | | | | |
| 2140; 29/30 | | | | | |
| 1071; 514429123; | 1654 | 2791 | 4484 | n/a | n/a |
| NZ_KE332377.1; 2141; | | | | | |
| 2142; 29/30 | | | | | |
| 1072; 514429123; | 1654 | 2791 | 4484 | n/a | n/a |
| NZ_KE332377.1; 2143; | | | | | |
| 2144; 29/30 | | | | | |
| 1073; 931536013; | 1474 | 2548 | 3890 | n/a | n/a |
| LJUL01000022.1; 2145; | | | | | |
| 2146; 38/39 | | | | | |
| 1074; 931536013; | 1474 | 2548 | 3890 | n/a | n/a |
| LJUL01000022.1; 2147; | | | | | |
| 2148; 38/39 | | | | | |
| 1075; 931536013; | 1474 | 2548 | 3890 | n/a | n/a |
| LJUL01000022.1; 2149; | | | | | |
| 2150; 38/39 | | | | | |
| 1076; 931536013; | 1474 | 2548 | 3890 | n/a | n/a |
| LJUL01000022.1; 2151; | | | | | |
| 2152; 38/39 | | | | | |
| 1077; 931536013; | 1474 | 2548 | 3890 | n/a | n/a |
| LJUL01000022.1; 2153; | | | | | |
| 2154; 38/39 | | | | | |
| 1078; 931536013; | 1474 | 2548 | 3890 | n/a | n/a |
| LJUL01000022.1; 2155; | | | | | |
| 2156; 38/39 | | | | | |
| 1079; 575082509; | 1432 | 2492 | 3860 | n/a | n/a |
| BAVS01000030.1; | | | | | |
| 2157; 2158; 19/20 | | | | | |
| 1080; 930349143; | 1362 | 2398 | 3798 | n/a | n/a |
| CP012036.1; 2159; | | | | | |
| 2160; 21/22 | | | | | |
| 1081; 575082509; | 1432 | 2492 | 3860 | n/a | n/a |
| BAVS01000030.1; | | | | | |
| 2161; 2162; 19/20 | | | | | |
| 1082; 427705465; | 1637 | 2759 | 4047 | n/a | n/a |
| NC_019676.1; 2163; | | | | | |
| 2164; 21/22 | | | | | |
| 1083; 428303693; | 1639 | 2765 | 4054 | n/a | n/a |
| NC_019753.1; 2165; | | | | | |
| 2166; 15/16 | | | | | |
| 1084; 359367134; | 1578 | 3064 | 3969 | n/a | n/a |
| NZ_AFEJ01000154.1; | | | | | |
| 2167; 2168; 21/22 | | | | | |
| 1085; 359367134; | 1578 | 3064 | 3969 | n/a | n/a |
| NZ_AFEJ01000154.1; | | | | | |
| 2169; 2170; 21/22 | | | | | |
| 1086; 325957759; | 1614 | 2726 | 4012 | n/a | n/a |
| NC_015216.1; 2171; | | | | | |
| 2172; 21/22 | | | | | |
| 1087; 851140085; | 2111 | 3601 | 4456 | n/a | n/a |
| NZ_JQKN01000008.1; | | | | | |
| 2173; 2174; 21/22 | | | | | |
| 1088; 748181452; | 2014 | 3322 | 4370 | n/a | n/a |
| NZ_JTCM01000043.1; | | | | | |
| 2175; 2176; 21/22 | | | | | |
| 1089; 748181452; | 2014 | 3322 | 4370 | n/a | n/a |
| NZ_JTCM01000043.1; | | | | | |
| 2177; 2178; 21/22 | | | | | |
| 1090; 158333233; | 1595 | 2694 | 3990 | n/a | n/a |
| NC_009925.1; 2179; | | | | | |
| 2180; 21/22 | | | | | |
| 1091; 158333233; | 1595 | 2694 | 3990 | n/a | n/a |
| NC_009925.1; 2181; | | | | | |
| 2182; 21/22 | | | | | |
| 1092; 851114167; | 2232 | 3619 | 4455 | n/a | n/a |
| NZ_LN515531.1; 2183; | | | | | |
| 2184; 23/24 | | | | | |
| 1093; 952971377; | 1379 | 2426 | 3819 | n/a | n/a |
| LN734822.1; 2185; | | | | | |
| 2186; 25/26 | | | | | |
| 1094; 428267688; | n/a | 2372 | 3779 | n/a | n/a |
| CP003653.1; 2187; | | | | | |
| 2188; 22/23 | | | | | |
| 1095; 333986242; | 1617 | 2731 | 4017 | n/a | n/a |
| NC_015574.1; 2189; | | | | | |
| 2190; 24/25 | | | | | |
| 1096; 739419616; | 2178 | 3232 | 4490 | n/a | n/a |
| NZ_KK088564.1; 2191; | | | | | |
| 2192; 20/21 | | | | | |
| 1097; 739419616; | 2178 | 3232 | 4490 | n/a | n/a |
| NZ_KK088564.1; 2193; | | | | | |
| 2194; 31/32 | | | | | |
| 1098; 427727289; | 1638 | 2763 | 4052 | n/a | n/a |
| NC_019684.1; 2195; | | | | | |
| 2196; 21/22 | | | | | |
| 1099; 890002594; | 2121 | 3496 | 4466 | n/a | n/a |
| NZ_JXCA01000005.1; | | | | | |
| 2197; 2198; 21/22 | | | | | |
| 1100; 652337551; | 1788 | 3003 | 4194 | n/a | n/a |
| NZ_KI912149.1; 2199; | | | | | |
| 2200; 31/32 | | | | | |
| 1101; 427415532; | 1535 | 2624 | 3937 | n/a | n/a |
| NZ_JH993797.1; 2201; | | | | | |
| 2202; 22/23 | | | | | |
| 1102; 551035505; | 1736 | 2901 | n/a | n/a | n/a |
| NZ_ATVS01000030.1; | | | | | |
| 2203; 2204; 20/21 | | | | | |
| 1103; 553740975; | 2172 | 2907 | 4145 | n/a | n/a |
| NZ_AWNH01000084.1; | | | | | |
| 2205; 2206; 22/23 | | | | | |
| 1104; 851351157; | 2112 | 3483 | 4457 | n/a | n/a |
| NZ_JQLY01000001.1; | | | | | |
| 2207; 2208; 25/26 | | | | | |
| 1105; 485067373; | 1713 | 2868 | 4113 | n/a | n/a |
| NZ_KB217478.1; 2209; | | | | | |
| 2210; 58/59 | | | | | |
| 1106; 451945650; | 1341 | 2373 | 3780 | n/a | n/a |
| NC_020304.1; 2211; | | | | | |
| 2212; 36/37 | | | | | |
| 1107; 938259025; | 1478 | 2552 | 3892 | n/a | n/a |
| LJSW01000006.1; 2213; | | | | | |
| 2214; 25/26 | | | | | |
| 1108; 557371823; | 1741 | 3517 | 4473 | n/a | n/a |
| NZ_ASGZ01000002.1; | | | | | |
| 2215; 2216; 26/27 | | | | | |
| 1109; 336251750; | 1619 | 2735 | 4020 | n/a | n/a |
| NC_015658.1; 2217; | | | | | |
| 2218; 26/27 | | | | | |
| 1110; 557371823; | 1418 | 2472 | 3850 | n/a | n/a |
| NZ_ASGZ01000002.1; | | | | | |
| 2219; 2220; 26/27 | | | | | |
| 1111; 484104632; | 1689 | 2839 | 4098 | n/a | n/a |
| NZ_KB235948.1; 2221; | | | | | |
| 2222; 32/33 | | | | | |
| 1112; 484104632; | 1689 | 2839 | 4098 | n/a | n/a |
| NZ_KB235948.1; 2223; | | | | | |
| 2224; 32/33 | | | | | |
| 1113; 448406329; | 1537 | 2627 | 3941 | n/a | n/a |
| NZ_AOIU01000004.1; | | | | | |
| 2225; 2226; 24/25 | | | | | |
| 1114; 751565075; | 2025 | 3345 | 4383 | n/a | n/a |
| NZ_JXCB01000004.1; | | | | | |
| 2227; 2228; 21/22 | | | | | |
| 1115; 119943794; | 2034 | 2688 | 3984 | n/a | n/a |
| NC_008709.1; 2229; | | | | | |
| 2230; 38/39 | | | | | |
| 1116; 563938926; | 2319 | 3741 | 4575 | n/a | n/a |
| NZ_AYWX01000007.1; | | | | | |
| 2231; 2232; 26/27 | | | | | |
| 1117; 451945650; | 1642 | 3367 | 4508 | n/a | n/a |
| NC_020304.1; 2233; | | | | | |
| 2234; 24/25 | | | | | |
| 1118; 563938926; | 2319 | 3735 | 4575 | n/a | n/a |
| NZ_AYWX01000007.1; | | | | | |
| 2235; 2236; 26/27 | | | | | |
| 1119; 655133038; | 1826 | 3048 | n/a | n/a | n/a |
| NZ_AUCV01000014.1; | | | | | |
| 2237; 2238; 32/33 | | | | | |
| 1120; 947704650; | 2316 | 3731 | 4572 | n/a | n/a |
| NZ_LMID01000016.1; | | | | | |
| 2239; 2240; 22/23 | | | | | |
| 1121; 294505815; | 2153 | 2710 | 4001 | n/a | n/a |
| NC_014032.1; 2241; | | | | | |
| 2242; 21/22 | | | | | |
| 1122; 294505815; | 2153 | 2710 | 4001 | n/a | n/a |
| NC_014032.1; 2243; | | | | | |
| 2244; 18/19 | | | | | |
| 1123; 947919015; | 2318 | 3734 | 4574 | n/a | n/a |
| NZ_LMHP01000012.1; | | | | | |
| 2245; 2246; 26/27 | | | | | |
| 1124; 780791108; | n/a | 2518 | 3869 | n/a | n/a |
| LADS01000058.1; 2247; | | | | | |
| 2248; 22/23 | | | | | |
| 1125; 738999090; | 2176 | 3226 | 4342 | n/a | n/a |
| NZ_KK073873.1; 2249; | | | | | |
| 2250; 26/27 | | | | | |
| 1126; 408381849; | 1519 | 2604 | 3927 | n/a | n/a |
| NZ_AMPO01000004.1; | | | | | |
| 2251; 2252; 28/29 | | | | | |
| 1127; 338209545; | n/a | 2738 | n/a | n/a | n/a |
| NC_015703.1; 2253; | | | | | |
| 2254; 33/34 | | | | | |
| 1128; 294505815; | 2153 | 2710 | 4001 | n/a | n/a |
| NC_014032.1; 2255; | | | | | |
| 2256; 19/20 | | | | | |
| 1129; 294505815; | 2153 | 2710 | 4001 | n/a | n/a |
| NC_014032.1; 2257; | | | | | |
| 2258; 18/19 | | | | | |
| 1130; 427705465; | n/a | 2370 | 3777 | n/a | n/a |
| NC_019676.1; 2259; | | | | | |
| 2260; 35/36 | | | | | |
| 1131; 427705465; | n/a | 3493 | 4046 | n/a | n/a |
| NC_019676.1; 2261; | | | | | |
| 2262; 35/36 | | | | | |
| 1132; 640169055; | 1757 | 2958 | 4487 | n/a | n/a |
| NZ_JAFS01000002.1; | | | | | |
| 2263; 2264; 40/41 | | | | | |
| 1133; 943897669; | 2298 | 3707 | 4550 | n/a | n/a |
| NZ_LIQQ01000007.1; | | | | | |
| 2265; 2266; 21/22 | | | | | |
| 1134; 943674269; | 2296 | 3705 | 4548 | n/a | n/a |
| NZ_LIQO01000205.1; | | | | | |
| 2267; 2268; 21/22 | | | | | |
| 1135; 386348020; | 1587 | 2680 | 3978 | n/a | n/a |
| NC_017584.1; 2269; | | | | | |
| 2270; 36/37 | | | | | |
| 1136; 931421682; | 1473 | 2547 | 3889 | n/a | n/a |
| LJTQ01000030.1; 2271; | | | | | |
| 2272; 29/30 | | | | | |
| 1137; 890444402; | 2122 | 3497 | 4467 | n/a | n/a |
| NZ_CP011310.1; 2273; | | | | | |
| 2274; 30/31 | | | | | |
| 1138; 41582259; | 1316 | 2337 | n/a | n/a | n/a |
| AY458641.2; 2275; | | | | | |
| 2276; 42/43 | | | | | |
| 1139; 41582259; | 2021 | 2631 | n/a | n/a | n/a |
| AY458641.2; 2277; | | | | | |
| 2278; 42/43 | | | | | |
| 1140; 554634310; | n/a | 3555 | 4147 | n/a | n/a |
| NC_022600.1; 2279; | | | | | |
| 2280; 28/29 | | | | | |
| 1141; 947721816; | 2317 | 3732 | 4573 | n/a | n/a |
| NZ_LMIB01000001.1; | | | | | |
| 2281; 2282; 22/23 | | | | | |
| 1142; 554634310; | n/a | 2377 | 3784 | n/a | n/a |
| NC_022600.1; 2283; | | | | | |
| 2284; 28/29 | | | | | |
| 1143; 483724571; | n/a | 2854 | 4106 | n/a | n/a |
| NZ_KB904821.1; 2285; | | | | | |
| 2286; 26/27 | | | | | |
| 1144; 557835508; | 1743 | 2911 | 4149 | n/a | n/a |
| NZ_AWGE01000033.1; | | | | | |
| 2287; 2288; 25/26 | | | | | |
| 1145; 575082509; | 1432 | 2492 | 3860 | n/a | n/a |
| BAVS01000030.1; | | | | | |
| 2289; 2290; 19/20 | | | | | |
| 1146; 553739852; | 1906 | 2905 | 4143 | n/a | n/a |
| NZ_AWNH01000066.1; | | | | | |
| 2291; 2292; 33/34 | | | | | |
| 1147; 484345004; | 1667 | 2806 | 4078 | n/a | n/a |
| NZ_JH947126.1; 2293; | | | | | |
| 2294; 30/31 | | | | | |
| 1148; 482909235; | n/a | 2808 | n/a | n/a | n/a |
| NZ_JH980292.1; 2295; | | | | | |
| 2296; 32/33 | | | | | |
| 1149; 737370143; | 1947 | 3200 | 4330 | n/a | n/a |
| NZ_JQKI01000040.1; | | | | | |
| 2297; 2298; 18/19 | | | | | |
| 1150; 734983081; | n/a | 3180 | n/a | n/a | n/a |
| NZ_JSXI01000073.1; | | | | | |
| 2299; 2300; 24/25 | | | | | |
| 1151; 736965849; | 1941 | 3189 | 4324 | n/a | n/a |
| NZ_JMIW01000009.1; | | | | | |
| 2301; 2302; 26/27 | | | | | |
| 1152; 483219562; | 1697 | 2849 | 4103 | n/a | n/a |
| NZ_KB901875.1; 2303; | | | | | |
| 2304; 38/39 | | | | | |
| 1153; 326793322; | 1615 | 2727 | 4013 | n/a | n/a |
| NC_015276.1; 2305; | | | | | |
| 2306; 40/41 | | | | | |
| 1154; 347753732; | 1626 | 2744 | 4027 | n/a | n/a |
| NC_016024.1; 2307; | | | | | |
| 2308; 41/42 | | | | | |
| 1155; 947472882; | 2312 | 3726 | 4566 | n/a | n/a |
| NZ_LMRH01000002.1; | | | | | |
| 2309; 2310; 21/22 | | | | | |
| 1156; 953813788; | n/a | 3748 | n/a | n/a | n/a |
| NZ_LNBE01000002.1; | | | | | |
| 2311; 2312; 12/13 | | | | | |
| 1157; 943922224; | 2301 | 3710 | 4553 | n/a | n/a |
| NZ_LIQU01000122.1; | | | | | |
| 2313; 2314; 12/13 | | | | | |
| 1158; 944029528; | 2306 | 3717 | 4560 | n/a | n/a |
| NZ_LIQZ01000126.1; | | | | | |
| 2315; 2316; 12/13 | | | | | |
| 1159; 943898694; | 2299 | 3708 | 4551 | n/a | n/a |
| NZ_LIQN01000037.1; | | | | | |
| 2317; 2318; 19/20 | | | | | |
| 1160; 953813789; | n/a | 3749 | n/a | n/a | n/a |
| NZ_LNBE01000003.1; | | | | | |
| 2319; 2320; 49/50 | | | | | |
| 1161; 943881150; | 2297 | 3706 | 4549 | n/a | n/a |
| NZ_LIPP01000138.1; | | | | | |
| 2321; 2322; 35/36 | | | | | |
| 1162; 943927948; | 2302 | 3712 | 4555 | n/a | n/a |
| NZ_LIQV01000315.1; | | | | | |
| 2323; 2324; 24/25 | | | | | |
| 1163; 943949281; | 2303 | 3713 | 4556 | n/a | n/a |
| NZ_LIPN01000124.1; | | | | | |
| 2325; 2326; 21/22 | | | | | |
| 1164; 951121600; | 2327 | 3746 | 4585 | n/a | n/a |
| NZ_LMEQ01000031.1; | | | | | |
| 2327; 2328; 21/22 | | | | | |
| 1165; 944495433; | 2307 | 3720 | 4563 | n/a | n/a |
| NZ_LIRK01000018.1; | | | | | |
| 2329; 2330; 21/22 | | | | | |
| 1166; 943899498; | 2300 | 3709 | 4552 | n/a | n/a |
| NZ_LIQN01000384.1; | | | | | |
| 2331; 2332; 21/22 | | | | | |
| 1167; 483258918; | 1392 | 2443 | 3830 | n/a | n/a |
| NZ_AMFE01000033.1; | | | | | |
| 2333; 2334; 19/20 | | | | | |
| 1168; 483258918; | 1392 | 2443 | 3830 | n/a | n/a |
| NZ_AMFE01000033.1; | | | | | |
| 2335; 2336; 19/20 | | | | | |
| 1169; 944012845; | 2305 | 3715 | 4558 | n/a | n/a |
| NZ_LIPQ01000171.1; | | | | | |
| 2337; 2338; 40/41 | | | | | |
| 1170; 664052786; | 1874 | 3097 | 4270 | n/a | n/a |
| NZ_JOES01000014.1; | | | | | |
| 2339; 2340; 21/22 | | | | | |
| 1171; 652876473; | n/a | 2634 | 3947 | n/a | n/a |
| NZ_KI912267.1; 2341; | | | | | |
| 2342; 34/35 | | | | | |
| 1172; 959926096; | 1815 | 3036 | 4337 | n/a | n/a |
| NZ_LMTZ01000085.1; | | | | | |
| 2343; 2344; 21/22 | | | | | |
| 1173; 959868240; | 2329 | 3751 | 4165 | n/a | n/a |
| NZ_CP013252.1; 2345; | | | | | |
| 2346; 18/19 | | | | | |
| 1174; 483254584; | 2157 | 2881 | 4127 | n/a | n/a |
| NZ_KB902362.1; 2347; | | | | | |
| 2348; 42/43 | | | | | |
| 1175; 655990125; | 1831 | 3600 | 4510 | n/a | n/a |
| NZ_AUBC01000024.1; | | | | | |
| 2349; 2350; 26/27 | | | | | |
| 1176; 746187665; | 2219 | 3305 | 4365 | n/a | n/a |
| NZ_JWSY01000013.1; | | | | | |
| 2351; 2352; 12/13 | | | | | |
| 1177; 443625867; | 1518 | 2603 | 4356 | n/a | n/a |
| NZ_AMLP01000127.1; | | | | | |
| 2353; 2354; 20/21 | | | | | |
| 1178; 386284588; | 1551 | 2641 | 3952 | n/a | n/a |
| NZ_AJLE01000006.1; | | | | | |
| 2355; 2356; 26/27 | | | | | |
| 1179; 826051019; | 2244 | 3631 | 4446 | n/a | n/a |
| NZ_LDES01000074.1; | | | | | |
| 2357; 2358; 22/23 | | | | | |
| 1180; 312128809; | n/a | 2718 | n/a | n/a | n/a |
| NC_014655.1; 2359; | | | | | |
| 2360; 25/26 | | | | | |
| 1181; 482849861; | 1506 | 2589 | 3920 | n/a | n/a |
| NZ_AKBU01000001.1; | | | | | |
| 2361; 2362; 3/4 | | | | | |
| 1182; 879201007; | 1380 | 2427 | 3820 | n/a | n/a |
| CKIK01000005.1; 2363; | | | | | |
| 2364; 19/20 | | | | | |
| 1183; 482849861; | 1585 | 2677 | 3963 | n/a | n/a |
| NZ_AKBU01000001.1; | | | | | |
| 2365; 2366; 3/4 | | | | | |
| 1184; 835319962; | 2213 | 3474 | 4447 | n/a | n/a |
| NZ_JTLD01000119.1; | | | | | |
| 2367; 2368; 22/23 | | | | | |
| 1185; 766607514; | 1839 | 3426 | 4421 | n/a | n/a |
| NZ_JTHO01000003.1; | | | | | |
| 2369; 2370; 20/21 | | | | | |
| 1186; 671525382; | n/a | 3130 | 4496 | n/a | n/a |
| NZ_JODL01000019.1; | | | | | |
| 2371; 2372; 31/32 | | | | | |
| 1187; 146276058; | 1591 | 2691 | 3986 | n/a | n/a |
| NC_009428.1; 2373; | | | | | |
| 2374; 32/33 | | | | | |
| 1188; 563938926; | 1620 | 2736 | 4021 | n/a | n/a |
| NZ_AYWX01000007.1; | | | | | |
| 2375; 2376; 26/27 | | | | | |
| 1189; 739662450; | n/a | n/a | n/a | n/a | n/a |
| NZ_JNFD01000038.1; | | | | | |
| 2377; 2378; 20/21 | | | | | |
| 1190; 739662450; | 1444 | n/a | n/a | n/a | n/a |
| NZ_JNFD01000038.1; | | | | | |
| 2379; 2380; 20/21 | | | | | |
| 1191; 906292938; | 1740 | 2909 | n/a | n/a | n/a |
| CXPB01000073.1; 2381; | | | | | |
| 2382; 18/19 | | | | | |
| 1192; 653556699; | 1813 | 3034 | n/a | n/a | n/a |
| NZ_AUEZ01000087.1; | | | | | |
| 2383; 2384; 26/27 | | | | | |
| 1193; 844809159; | 2107 | 3479 | 4450 | n/a | n/a |
| NZ_LDPH01000011.1; | | | | | |
| 2385; 2386; 20/21 | | | | | |
| 1194; 483961722; | n/a | 2988 | n/a | n/a | n/a |
| NZ_KB890915.1; 2387; | | | | | |
| 2388; 71/72 | | | | | |
| 1195; 739487309; | n/a | 3235 | n/a | n/a | 4504 |
| NZ_JPLW01000007.1; | | | | | |
| 2389; 2390; 27/28 | | | | | |
| 1196; 921170702; | 1884 | 3456 | n/a | n/a | n/a |
| NZ_CP009922.2; 2391; | | | | | |
| 2392; 13/14 | | | | | |
| 1197; 644043488; | 1764 | 3202 | 4174 | n/a | n/a |
| NZ_AZUQ01000001.1; | | | | | |
| 2393; 2394; 19/20 | | | | | |
| 1198; 921170702; | 1356 | 2390 | n/a | n/a | n/a |
| NZ_CP009922.2; 2395; | | | | | |
| 2396; 13/14 | | | | | |
| 1199; 254392242; | 1513 | 2598 | 3922 | n/a | n/a |
| NZ_DS570678.1; 2397; | | | | | |
| 2398; 39/40 | | | | | |
| 1200; 483975550; | 2158 | 3263 | n/a | n/a | n/a |
| NZ_KB892001.1; 2399; | | | | | |
| 2400; 30/31 | | | | | |
| 1201; 550281965; | n/a | 3336 | n/a | n/a | n/a |
| NZ_ASSJ01000070.1; | | | | | |
| 2401; 2402; 27/28 | | | | | |
| 1202; 291297538; | 1330 | 2355 | n/a | n/a | n/a |
| NC_013947.1; 2403; | | | | | |
| 2404; 29/30 | | | | | |
| 1203; 662129456; | n/a | 3532 | n/a | n/a | n/a |
| NZ_KL573544.1; 2405; | | | | | |
| 2406; 28/29 | | | | | |
| 1204; 291297538; | 1606 | 3362 | 4389 | n/a | n/a |
| NC_013947.1; 2407; | | | | | |
| 2408; 29/30 | | | | | |
| 1205; 484015294; | 1777 | 2826 | 4091 | n/a | n/a |
| NZ_ANAX01000026.1; | | | | | |
| 2409; 2410; 29/30 | | | | | |
| 1206; 655370026; | 2166 | 3051 | 4223 | n/a | n/a |
| NZ_ATZF01000001.1; | | | | | |
| 2411; 2412; 21/22 | | | | | |
| 1207; 484016825; | n/a | 2827 | n/a | n/a | n/a |
| NZ_ANAY01000003.1; | | | | | |
| 2413; 2414; 22/23 | | | | | |
| 1208; 926283036; | n/a | 3650 | n/a | n/a | n/a |
| NZ_LGEC01000103.1; | | | | | |
| 2415; 2416; 66/67 | | | | | |
| 1209; 408675720; | 1636 | 2757 | n/a | n/a | n/a |
| NC_018750.1; 2417; | | | | | |
| 2418; 27128 | | | | | |
| 1210; 254387191; | 1554 | 3634 | n/a | n/a | n/a |
| NZ_DS570483.1; 2419; | | | | | |
| 2420; 27/28 | | | | | |
| 1211; 772744565; | n/a | 2517 | 3868 | n/a | n/a |
| NZ_JYJG01000059.1; | | | | | |
| 2421; 2422; 33/34 | | | | | |
| 1212; 919531973; | 2243 | 3627 | 4519 | n/a | n/a |
| NZ_JOEK01000003.1; | | | | | |
| 2423; 2424; 25/26 | | | | | |
| 1213; 671498318; | 2194 | 3580 | n/a | n/a | n/a |
| NZ_JOFR01000042.1; | | | | | |
| 2425; 2426; 23/24 | | | | | |
| 1214; 671498318; | 2194 | 3580 | n/a | n/a | n/a |
| NZ_JOFR01000042.1; | | | | | |
| 2427; 2428; 34/35 | | | | | |
| 1215; 514917321; | 1660 | 2796 | 4072 | n/a | n/a |
| NZ_AOPZ01000063.1; | | | | | |
| 2429; 2430; 37/38 | | | | | |
| 1216; 739097522; | 2174 | 3227 | n/a | n/a | n/a |
| NZ_KI911740.1; 2431; | | | | | |
| 2432; 28/29 | | | | | |
| 1217; 665618015; | 2187 | 3567 | 4310 | n/a | n/a |
| NZ_JODR01000032.1; | | | | | |
| 2433; 2434; 40/41 | | | | | |
| 1218; 926412094; | n/a | 3662 | n/a | n/a | 4532 |
| NZ_LGDY01000103.1; | | | | | |
| 2435; 2436; 30/31 | | | | | |
| 1219; 935540718; | n/a | 2544 | n/a | n/a | n/a |
| NZ_LGJH01000063.1; | | | | | |
| 2437; 2438; 23/24 | | | | | |
| 1220; 665536304; | 2195 | 3582 | 4297 | n/a | n/a |
| NZ_JOCD01000152.1; | | | | | |
| 2439; 2440; 35/36 | | | | | |
| 1221; 665618015; | 2187 | 3564 | 4310 | n/a | n/a |
| NZ_JODR01000032.1; | | | | | |
| 2441; 2442; 40/41 | | | | | |
| 1222; 772744565; | n/a | 3431 | 4425 | n/a | n/a |
| NZ_JYJG01000059.1; | | | | | |
| 2443; 2444; 33/34 | | | | | |
| 1223; 483112234; | 2212 | 2798 | n/a | n/a | n/a |
| NZ_AGVX02000406.1; | | | | | |
| 2445; 2446; 24/25 | | | | | |
| 1224; 739372122; | n/a | n/a | 3865 | n/a | n/a |
| NZ_JQHE01000003.1; | | | | | |
| 2447; 2448; 11/12 | | | | | |
| 1225; 739372122; | n/a | n/a | 3865 | n/a | n/a |
| NZ_JQHE01000003.1; | | | | | |
| 2449; 2450; 13/14 | | | | | |
| 1226; 664360925; | 2197 | 3114 | 4285 | n/a | n/a |
| NZ_JOGD01000054.1; | | | | | |
| 2451; 2452; 25/26 | | | | | |
| 1227; 358468594; | n/a | 2669 | n/a | n/a | n/a |
| NZ_FR873693.1; 2453; | | | | | |
| 2454; 14/15 | | | | | |
| 1228; 358468594; | n/a | 2669 | n/a | n/a | n/a |
| NZ_FR873693.1; 2455; | | | | | |
| 2456; 26/27 | | | | | |
| 1229; 358468601; | 1580 | 2670 | n/a | n/a | n/a |
| NZ_FR873700.1; 2457; | | | | | |
| 2458; 69/70 | | | | | |
| 1230; 663199697; | n/a | 3082 | n/a | n/a | n/a |
| NZ_JOHO01000012.1; | | | | | |
| 2459; 2460; 30/31 | | | | | |
| 1231; 665671804; | 2145 | 3538 | 4308 | n/a | n/a |
| NZ_JOCK01000052.1; | | | | | |
| 2461; 2462; 40/41 | | | | | |
| 1232; 254387191; | 1388 | 2436 | n/a | n/a | n/a |
| NZ_DS570483.1; 2463; | | | | | |
| 2464; 27/28 | | | | | |
| 1233; 224581098; | 1557 | 2648 | n/a | n/a | n/a |
| NZ_GG657748.1; 2465; | | | | | |
| 2466; 35/36 | | | | | |
| 1234; 110677421; | 1589 | 2685 | 3982 | n/a | n/a |
| NC_008209.1; 2467; | | | | | |
| 2468; 22/23 | | | | | |
| 1235; 563312125; | 1588 | 2682 | n/a | n/a | n/a |
| AYTZ01000052.1; | | | | | |
| 2469; 2470; 31/32 | | | | | |
| 1236; 935540718; | n/a | 3686 | n/a | n/a | n/a |
| NZ_LGJH01000063.1; | | | | | |
| 2471; 2472; 23/24 | | | | | |
| 1237; 326336949; | n/a | 2659 | n/a | n/a | n/a |
| NZ_CM001018.1; 2473; | | | | | |
| 2474; 35/36 | | | | | |
| 1238; 663670981; | n/a | 3092 | n/a | n/a | 4262 |
| NZ_JODQ01000007.1; | | | | | |
| 2475; 2476; 20/21 | | | | | |
| 1239; 546154317; | n/a | n/a | n/a | n/a | n/a |
| NZ_ACVN02000045.1; | | | | | |
| 2477; 2478; 18/19 | | | | | |
| 1240; 563312125; | 1588 | 3211 | n/a | n/a | n/a |
| AYTZ01000052.1; | | | | | |
| 2479; 2480; 31/32 | | | | | |
| 1241; 483258918; | 1392 | 2443 | 3830 | n/a | n/a |
| NZ_AMFE01000033.1; | | | | | |
| 2481; 2482; 19/20 | | | | | |
| 1242; 483258918; | 1392 | 2443 | 3830 | n/a | n/a |
| NZ_AMFE01000033.1; | | | | | |
| 2483; 2484; 19/20 | | | | | |
| 1243; 820820518; | 2237 | 3624 | n/a | n/a | n/a |
| NZ_KQ061219.1; 2485; | | | | | |
| 2486; 31/32 | | | | | |
| 1244; 514348304; | 1657 | 2795 | n/a | n/a | n/a |
| NZ_ASQH01000001.1; | | | | | |
| 2487; 2488; 26/27 | | | | | |
| 1245; 928675838; | 1386 | 2434 | n/a | n/a | n/a |
| CYTQ01000003.1; | | | | | |
| 2489; 2490; 27/28 | | | | | |
| 1246; 652698054; | 1793 | 3009 | 4198 | n/a | n/a |
| NZ_KI912610.1; 2491; | | | | | |
| 2492; 26/27 | | | | | |
| 1247; 759875025; | n/a | 3400 | n/a | n/a | n/a |
| NZ_JONS01000016.1; | | | | | |
| 2493; 2494; 12/13 | | | | | |
| 1248; 664141438; | n/a | 3584 | n/a | n/a | n/a |
| NZ_JOJM01000019.1; | | | | | |
| 2495; 2496; 29/30 | | | | | |
| 1249; 483258918; | 1392 | 2443 | 3830 | n/a | n/a |
| NZ_AMFE01000033.1; | | | | | |
| 2497; 2498; 19/20 | | | | | |
| 1250; 483258918; | 1392 | 2443 | 3830 | n/a | n/a |
| NZ_AMFE01000033.1; | | | | | |
| 2499; 2500; 19/20 | | | | | |
| 1251; 929862756; | 1732 | 2897 | 4137 | n/a | n/a |
| NZ_LGKI01000090.1; | | | | | |
| 2501; 2502; 27/28 | | | | | |
| 1252; 378759075; | 1575 | 2664 | 3966 | n/a | n/a |
| NZ_AFXE01000029.1; | | | | | |
| 2503; 2504; 22/23 | | | | | |
| 1253; 484005069; | n/a | 3551 | n/a | n/a | n/a |
| NZ_KB894416.1; 2505; | | | | | |
| 2506; 18/19 | | | | | |
| 1254; 563478461; | n/a | 2932 | 4154 | n/a | n/a |
| NZ_AYVQ01000029.1; | | | | | |
| 2507; 2508; 30/31 | | | | | |
| 1255; 482984722; | 1780 | 2848 | n/a | n/a | n/a |
| NZ_KB900605.1; 2509; | | | | | |
| 2510; 23/24 | | | | | |
| 1256; 563478461; | n/a | 2923 | 4156 | n/a | n/a |
| NZ_AYVQ01000029.1; | | | | | |
| 2511; 2512; 30/31 | | | | | |
| 1257; 563478461; | n/a | 2920 | 4156 | n/a | n/a |
| NZ_AYVQ01000029.1; | | | | | |
| 2513; 2514; 30/31 | | | | | |
| 1258; 563478461; | n/a | 2917 | 4154 | n/a | n/a |
| NZ_AYVQ01000029.1; | | | | | |
| 2515; 2516; 30/31 | | | | | |
| 1259; 563478461; | n/a | 2940 | 4161 | n/a | n/a |
| NZ_AYVQ01000029.1; | | | | | |
| 2517; 2518; 30/31 | | | | | |
| 1260; 563478461; | n/a | 2924 | 4158 | n/a | n/a |
| NZ_AYVQ01000029.1; | | | | | |
| 2519; 2520; 30/31 | | | | | |
| 1261;563478461; | n/a | 2933 | 4154 | n/a | n/a |
| NZ_AYVQ01000029.1; | | | | | |
| 2521; 2522; 30/31 | | | | | |
| 1262; 563478461; | n/a | 2926 | 4156 | n/a | n/a |
| NZ_AYVQ01000029.1; | | | | | |
| 2523; 2524; 30/31 | | | | | |
| 1263; 563312125; | 1426 | 2482 | n/a | n/a | n/a |
| AYTZ01000052.1; | | | | | |
| 2525; 2526; 31/32 | | | | | |
| 1264; 563478461; | n/a | 2928 | 4154 | n/a | n/a |
| NZ_AYVQ01000029.1; | | | | | |
| 2527; 2528; 30/31 | | | | | |
| 1265; 652698054; | 1800 | 3014 | 4202 | n/a | n/a |
| NZ_KI912610.1; 2529; | | | | | |
| 2530; 26/27 | | | | | |
| 1266; 652698054; | 1796 | 3011 | 4200 | n/a | n/a |
| NZ_KI912610.1; 2531; | | | | | |
| 2532; 26/27 | | | | | |
| 1267; 484023389; | 2154 | 2832 | n/a | n/a | n/a |
| NZ_ANBF01000087.1; | | | | | |
| 2533; 2534; 24/25 | | | | | |
| 1268; 655569633; | 1971 | 3057 | 4491 | n/a | n/a |
| NZ_JIAI01000002.1; | | | | | |
| 2535; 2536; 32/33 | | | | | |
| 1269; 655569633; | 1971 | 3057 | 4491 | n/a | n/a |
| NZ_JIAI01000002.1; | | | | | |
| 2537; 2538; 43/44 | | | | | |
| 1270; 655569633; | 1971 | 3057 | 4491 | n/a | n/a |
| NZ_JIAI01000002.1; | | | | | |
| 2539; 2540; 32/33 | | | | | |
| 1271; 563478461; | n/a | 2925 | 4158 | n/a | n/a |
| NZ_AYVQ01000029.1; | | | | | |
| 2541; 2542; 30/31 | | | | | |
| 1272; 740292158; | 2186 | 3276 | 4361 | n/a | n/a |
| NZ_AUNB01000028.1; | | | | | |
| 2543; 2544; 22/23 | | | | | |
| 1273; 563478461; | n/a | 2921 | 4157 | n/a | n/a |
| NZ_AYVQ01000029.1; | | | | | |
| 2545; 2546; 30/31 | | | | | |
| 1274; 563478461; | n/a | 2930 | 4154 | n/a | n/a |
| NZ_AYVQ01000029.1; | | | | | |
| 2547; 2548; 30/31 | | | | | |
| 1275; 563478461; | n/a | 2927 | 4154 | n/a | n/a |
| NZ_AYVQ01000029.1; | | | | | |
| 2549; 2550; 30/31 | | | | | |
| 1276; 563478461; | n/a | 2918 | 4155 | n/a | n/a |
| NZ_AYVQ01000029.1; | | | | | |
| 2551; 2552; 30/31 | | | | | |
| 1277; 740220529; | 2185 | 3274 | 4495 | n/a | n/a |
| NZ_JHEH01000002.1; | | | | | |
| 2553; 2554; 13/14 | | | | | |
| 1278; 563478461; | n/a | 2919 | 4154 | n/a | n/a |
| NZ_AYVQ01000029.1; | | | | | |
| 2555; 2556; 30/31 | | | | | |
| 1279; 483454700; | 1722 | 2987 | 4128 | n/a | n/a |
| NZ_KB903974.1; 2557; | | | | | |
| 2558; 31/32 | | | | | |
| 1280; 835355240; | 2103 | 3475 | n/a | n/a | n/a |
| NZ_KN549147.1; 2559; | | | | | |
| 2560; 13/14 | | | | | |
| 1281; 563478461; | n/a | 2929 | 4154 | n/a | n/a |
| NZ_AYVQ01000029.1; | | | | | |
| 2561; 2562; 30/31 | | | | | |
| 1282; 563478461; | n/a | 2944 | 4158 | n/a | n/a |
| NZ_AYVQ01000029.1; | | | | | |
| 2563; 2564; 30/31 | | | | | |
| 1283; 652698054; | 1921 | 3158 | 3972 | n/a | n/a |
| NZ_KI912610.1; 2565; | | | | | |
| 2566; 26/27 | | | | | |
| 1284; 563478461; | n/a | 2931 | 4154 | n/a | n/a |
| NZ_AYVQ01000029.1; | | | | | |
| 2567; 2568; 30/31 | | | | | |
| 1285; 563478461; | n/a | 2943 | 4154 | n/a | n/a |
| NZ_AYVQ01000029.1; | | | | | |
| 2569; 2570; 30/31 | | | | | |
| 1286; 652879634; | 1802 | 3019 | 4204 | n/a | n/a |
| NZ_AZUY01000007.1; | | | | | |
| 2571; 2572; 26/27 | | | | | |
| 1287; 652698054; | 1795 | 3010 | 4199 | n/a | n/a |
| NZ_KI912610.1; 2573; | | | | | |
| 2574; 26/27 | | | | | |
| 1288; 563478461; | n/a | 2922 | 4154 | n/a | n/a |
| NZ_AYVQ01000029.1; | | | | | |
| 2575; 2576; 30/31 | | | | | |
| 1289; 652698054; | 1803 | 3020 | 4205 | n/a | n/a |
| NZ_KI912610.1; 2577; | | | | | |
| 2578; 26/27 | | | | | |
| 1290; 563478461; | n/a | 3012 | 4154 | n/a | n/a |
| NZ_AYVQ01000029.1; | | | | | |
| 2579; 2580; 30/31 | | | | | |
| 1291; 563478461; | n/a | 2945 | 4154 | n/a | n/a |
| NZ_AYVQ01000029.1; | | | | | |
| 2581; 2582; 30/31 | | | | | |
| 1292; 652698054; | 1582 | 2673 | 3972 | n/a | n/a |
| NZ_KI912610.1; 2583; | | | | | |
| 2584; 26/27 | | | | | |
| 1293; 563478461; | n/a | 2942 | 4154 | n/a | n/a |
| NZ_AYVQ01000029.1; | | | | | |
| 2585; 2586; 30/31 | | | | | |
| 1294; 652698054; | 1798 | 3013 | 4201 | n/a | n/a |
| NZ_KI912610.1; 2587; | | | | | |
| 2588; 26/27 | | | | | |
| 1295; 563938926; | 2147 | 2941 | 4162 | n/a | n/a |
| NZ_AYWX01000007.1; | | | | | |
| 2589; 2590; 26/27 | | | | | |
| 1296; 483314733; | 1699 | 2851 | n/a | n/a | n/a |
| NZ_KB902785.1; 2591; | | | | | |
| 2592; 13/14 | | | | | |
| 1297; 652698054; | 1716 | 2875 | 4120 | n/a | n/a |
| NZ_KI912610.1; 2593; | | | | | |
| 2594; 26/27 | | | | | |
| 1298; 652698054; | 1920 | 2954 | 4009 | n/a | n/a |
| NZ_KI912610.1; 2595; | | | | | |
| 2596; 26/27 | | | | | |
| 1299; 652670206; | 1791 | 3008 | 4197 | n/a | n/a |
| NZ_AUEL01000005.1; | | | | | |
| 2597; 2598; 26/27 | | | | | |
| 1300; 657698352; | 1739 | 2908 | n/a | n/a | n/a |
| NZ_JDWO01000067.1; | | | | | |
| 2599; 2600; 25/26 | | | | | |
| 1301; 653526890; | 1961 | 3033 | n/a | n/a | n/a |
| NZ_AXAZ01000002.1; | | | | | |
| 2601; 2602; 26/27 | | | | | |
| 1302; 433771415; | 1749 | 2937 | 4056 | n/a | n/a |
| NC_019973.1; 2603; | | | | | |
| 2604; 26/27 | | | | | |
| 1303; 433771415; | 1749 | 2938 | 4056 | n/a | n/a |
| NC_019973.1; 2605; | | | | | |
| 2606; 26/27 | | | | | |
| 1304; 433771415; | 1641 | 2768 | 4056 | n/a | n/a |
| NC_019973.1; 2607; | | | | | |
| 2608; 26/27 | | | | | |
| 1305; 657698352; | 1739 | 3069 | n/a | n/a | n/a |
| NZ_JDWO01000067.1; | | | | | |
| 2609; 2610; 25/26 | | | | | |
| 1306; 339501577; | 1622 | 2739 | 4023 | n/a | n/a |
| NC_015730.1; 2611; | | | | | |
| 2612; 22/23 | | | | | |
| 1307; 639168743; | 1755 | 2955 | n/a | n/a | n/a |
| NZ_AWZU01000010.1; | | | | | |
| 2613; 2614; 21/22 | | | | | |
| 1308; 433771415; | 1749 | 2935 | 4056 | n/a | n/a |
| NC_019973.1; 2615; | | | | | |
| 2616; 26/27 | | | | | |
| 1309; 484075173; | n/a | 2801 | n/a | n/a | 4076 |
| NZ_AJLK01000109.1; | | | | | |
| 2617; 2618; 27/28 | | | | | |
| 1310; 906292938; | 1384 | 2432 | n/a | n/a | n/a |
| CXPB01000073.1; 2619; | | | | | |
| 2620; 18/19 | | | | | |
| 1311; 652912253; | 1962 | 3021 | 4206 | n/a | n/a |
| NZ_ATYO01000004.1; | | | | | |
| 2621; 2622; 26/27 | | | | | |
| 1312; 906292938; | 2018 | 3332 | n/a | n/a | n/a |
| CXPB01000073.1; 2623; | | | | | |
| 2624; 18/19 | | | | | |
| 1313; 970574347; | 1768 | 2814 | 4084 | n/a | n/a |
| NZ_LNZF01000001.1; | | | | | |
| 2625; 2626; 20/21 | | | | | |
| 1314; 970574347; | 2001 | 3307 | 4074 | n/a | n/a |
| NZ_LNZF01000001.1; | | | | | |
| 2627; 2628; 20/21 | | | | | |
| 1315; 970574347; | 1768 | 3129 | 4084 | n/a | n/a |
| NZ_LNZF01000001.1; | | | | | |
| 2629; 2630; 20/21 | | | | | |

TABLE 3
Exemplary Lasso Peptidase
Lasso Peptidase Peptide No: #; Species of Origin; GI #; Accession #

1316; Uncultured marine bacterium 463 clone EBAC080-L32B05 genomic
sequence; 41582259; AY458641.2
1317; Burkholderia pseudomallei 1710b chromosome I, complete sequence;
76808520; NC_007434.1
1318; Burkholderia thailandensis E555 BTHE555_314, whole genome shotgun sequence;
485035557; NZ_AECN01000315.1
1319; Frankia sp. CcI6 CcI6DRAFT_scaffold_51.52, whole genome shotgun sequence;
563312125; AYTZ01000052.1
1320; Sphingopyxis alaskensis RB2256, complete genome; 103485498;
NC_008048.1
1321; Sphingopyxis alaskensis RB2256, complete genome; 103485498;
NC_008048.1
1322; Streptococcus suis SC84 complete genome, strain SC84; 253750923;
NC_012924.1
1323; Geobacter uraniireducens Rf4, complete genome; 148262085;
NC_009483.1
1324; Caulobacter sp. K31, complete genome; 167643973; NC_010338.1
1325; Phenylobacterium zucineum HLK1, complete genome; 196476886;
CP000747.1
1326; Phenylobacterium zucineum HLK1, complete genome; 196476886;
CP000747.1
1327; Sanguibacter keddieii DSM 10542, complete genome; 269793358;
NC_013521.1
1328; Xylanimonas cellulosilytica DSM 15894, complete genome; 269954810;
NC_013530.1
1329; Spirosoma linguale DSM 74, complete genome; 283814236; CP001769.1
1330; Stackebrandtia nassauensis DSM 44728, complete genome; 291297538;
NC_013947.1
1331; Caulobacter segnis ATCC 21756, complete genome; 295429362;
CP002008.1
1332; Streptomyces bingchenggensis BCW-1, complete genome; 374982757;
NC_016582.1
1333; Gallionella capsifeniformans ES-2, complete genome; 302877245;
NC_014394.1
1334; Asticcacaulis excentricus CB 48 chromosome 1, complete sequence;
315497051; NC_014816.1
1335; Burkholderia gladioli BSR3 chromosome 1, complete sequence;
327367349; CP002599.1
1336; Sphingobium chlorophenolicum L-1 chromosome 1, complete sequence;
334100279; CP002798.1
1337; Streptomyces violaceusniger Tu 4113, complete genome; 345007964;
NC_015957.1
1338; Rhodospirillum rubrum F11, complete genome; 386348020; NC_017584.1
1339; Actinoplanes sp. SE50/110, complete genome; 386845069; NC_017803.1
1340; Bacillus thuringiensis MC28, complete genome; 407703236; NC_018693.1
1341; Desulfocapsa sulfexigens DSM 10523, complete genome; 451945650;
NC_020304.1
1342; Xanthomonas citri pv. punicae str. LMG 859, whole genome shotgun
sequence; 390991205; NZ_CAGJ01000031.1
1343; Streptomyces fulvissimus DSM 40593, complete genome; 488607535;
NC_021177.1
1344; Streptomyces rapamycinicus NRRL 5491 genome; 521353217;
CP006567.1
1345; Kutzneria albida strain NRRL B-24060 contig305.1, whole genome shotgun
sequence; 662161093; NZ_JNYH01000515.1
1346; Mesorhizobium huakuii 7653R genome; 657121522; CP006581.1
1347; Mesorhizobium huakuii 7653R genome; 657121522; CP006581.1
1348; Burkholderia thailandensis E555 BTHE555 314, whole genome shotgun
sequence; 485035557; NZ_AECN01000315.1
1349; Sphingopyxis fiibergensis strain Kp5.2, complete genome; 749188513;
NZ_CP009122.1
1350; Sphingopyxis fiibergensis strain Kp5.2, complete genome; 749188513;
NZ_CP009122.1
1351; Streptomyces sp. ZJ306 hydroxylase, deacetylase, and hypothetical proteins
genes, complete cds; ikarugamycin gene cluster, complete sequence; and GCN5-
related N-acetyltransferase, hypothetical protein, aspamgine synthase,
transcriptional regulator, ABC transporter, hypothetical proteins, putative
membrane transport protein, putative acetyltransferase, cytochrome P450, putative
alpha-glucosidase, phosphoketolase, helix-turn-helix domain-containing protein,
membrane protein, NAD-dependent epimera; 746616581; KF954512.1
1352; Streptomyces albus strain DSM 41398, complete genome; 749658562;
NZ_CP010519.1
1353; Amycolatopsis lurida NRRL 2430, complete genome; 755908329;
CP007219.1
1354; Streptomyces lydicus A02, complete genome; 822214995;
NZ_CP007699.1
1355; Streptomyces lydicus A02, complete genome; 822214995;
NZ_CP007699.1
1356; Streptomyces xiamenensis strain 318, complete genome; 921170702;
NZ_CP009922.2
1357; Streptomyces sp. PBH53 genome; 852460626; CP011799.1
1358; Streptomyces sp. PBH53 genome; 852460626; CP011799.1
1359; Streptomyces sp. PBH53 genome; 852460626; CP011799.1
1360; Sphingopyxis sp. 113P3, complete genome; 924898949; NZ_CP009452.1
1361; Sphingopyxis sp. 113P3, complete genome; 924898949; NZ_CP009452.1
1362; Nostoc piscinale CENA21 genome; 930349143; CP012036.1
1363; Sphingopyxis macrogoltabida strain 203, complete genome; 938956730;
NZ_CP009429.1
1364; Sphingopyxis macrogoltabida strain 203 plasmid, complete sequence;
938956814;
1365; Paenibacillus sp. 320-W, complete genome; 961447255; CP013653.1
1366; Streptomyces avermitilis MA-4680 = NBRC 14893, complete genome;
162960844; NC_003155 .4
1367; Kitasatospora setae KM-6054 DNA, complete genome; 357386972;
NC_016109.1
1368; Rhodococcus jostii lariatin biosynthetic gene cluster (larA, larB, larC, larD, larE),
complete cds; 380356103; AB593691.1
1369; Rubrivivax gelatinosus IL144 DNA, complete genome; 383755859;
NC_017075.1
1370; Fischerellathermalis PCC 7521 contig00099, whole genome shotgun
sequence; 484076371; NZ_AJLL01000098.1
1371; Streptococcus suis 5C84 complete genome, strain 5C84; 253750923;
NC_012924.1
1372; Enterococcus faecalis ATCC 29212 contig24, whole genome shotgun
sequence; 401673929; ALOD01000024.1
1373; Roseburia sp. CAG:197 WGS project CBBL01000000 data, contig, whole
genome shotgun sequence; 524261006; CBBL010000225.1
1374; Closltidium sp. CAG:221 WGS project CBDC01000000 data, contig,
whole genome shotgun sequence; 524362382; CBDC010000065.1
1375; Closltidium sp. CAG:411 WGS project CBIY01000000 data, contig, whole
genome shotgun sequence; 524742306; CBIY010000075.1
1376; Novosphingobium sp. KN65.2 WGS project CCBH000000000 data, contig
SPHv1_Contig_228, whole genome shotgun sequence; 808402906;
CCBH010000144.1
1377; Mesorhizobium plurifarium genome assembly Mesorhizobium plurifarium
ORS1032T genome assembly, contig MPL1032_Contig_21, whole genome
shotgun sequence; 927916006; CCND01000014.1
1378; Kibdelosporangium sp. MJ126-NF4, whole genome shotgun sequence;
754819815; NZ_CDME01000002.1
1379; Methanobacterium formicicum genome assembly isolate Mb9,
chromosome: I; 952971377; LN734822.1
1380; Streptococcus pneumoniae strain 37, whole genome shotgun sequence;
912676034; NZ_CMPZ01000004.1
1381; Streptococcus pneumoniae strain type strain: N, whole genome shotgun
NZ_CP009430.1 sequence; 950938054; NZ_CIHL01000007.1
1382; Streptococcus pneumoniae strain 37, whole genome shotgun sequence;
912676034; NZ_CMPZ01000004.1
1383; Klebsiella variicola genome assembly Kv4880, contig BN1200_Contig_75,
whole genome shotgun sequence; 906292938; CXPB01000073.1
1384; Klebsiella variicola genome assembly KvT29A, contig
BN1200_Contig_98, whole genome shotgun sequence; 906304012;
CXPA01000125.1
1385; Bacillus cereus genome assembly Bacillus JRS4, contig contig000025,
whole genome shotgun sequence; 924092470; CYHM01000025.1
1386; Achromobacter sp. 27895TDY5663426 genome assembly, contig.
ERS372662SCcontig000003, whole genome shotgun sequence; 928675838;
CYTQ01000003.1
1387; Pedobacter sp. BAL39 1103467000492, whole genome shotgun sequence;
149277373; NZ_ABCM01000005.1
1388; Streptomyces sp. Mg1 supercont1.100, whole genome shotgun sequence;
254387191; NZ_D5570483.1
1389; Streptomyces sviceus ATCC 29083 chromosome, whole genome shotgun
sequence; 297196766; NZ_CM000951.1
1390; Streptomyces pristinaespiralis ATCC 25486 chromosome, whole genome
shotgun sequence; 297189896; NZ_CM000950.1
1391; Streptomyces roseosporus NRRL 15998 supercont3.1 genomic scaffold,
whole genome shotgun sequence; 221717172; DS999644.1
1392; Streptococcus vestibularis F0396 ctg1126932565723, whole genome
shotgun sequence; 311100538; AEKO01000007.1
1393; Ruminococcus albus 8 contig00035, whole genome shotgun sequence;
325680876; NZ_ADKM02000123.1
1394; Streptomyces sp. W007 contig00293, whole genome shotgun sequence;
365867746; NZ_AGSW01000272.1
1395; Burkholderia pseudomallei 1258a Contig0089, whole genome shotgun
sequence; 418540998; NZ_AHJB01000089.1
1396; Burkholderia pseudomallei 1258a Contig0089, whole genome shotgun
sequence; 418540998; NZ_AHJB01000089.1
1397; Rhodanobacter sp. 115 contig437, whole genome shotgun sequence;
389759651; NZ_AJXS01000437.1
1398; Rhodanobacter thiooxydans LCS2 contig057, whole genome shotgun
sequence; 389809081; NZ_AJXW01000057.1
1399; Burkholderia thailandensis MSMB43 Scaffold3, whole genome shotgun
sequence; 424903876; NZ_JH692063.1
1400; Streptomyces auratus AGR0001 Scaffold1_85, whole genome shotgun
sequence; 396995461; AJGV01000085.1
1401; Uncultured bacterium ACD_75C02634, whole genome shotgun sequence;
406886663; AMFJ01033303.1
1402; Amycolatopsis decaplanina DSM 44594 Contig0055, whole genome
shotgun sequence; 458848256; NZ_AOHO01000055.1
1403; Streptomyces mobaraensis NBRC 13819 = DSM 40847 contig024, whole
genome shotgun sequence; 458977979; NZ_AORZ01000024.1
1404; Burkholderia mallei GB8 horse 4 contig 394, whole genome shotgun
sequence; 67639376; NZ_AAO001000116.1
1405; Enterococcus faecalis EnGen0363 strain RMC5 acAqY-supercont1.4,
whole genome shotgun sequence; 502232520; NZ_KB944632.1
1406; Enterococcus faecalis EnGen0233 strain UAA1014 acvJV-
supercont1.10.C18, whole genome shotgun sequence; 487281881;
AIZW01000018.1
1407; Pandoraea sp. SD6-2 scaffold29, whole genome shotgun sequence;
505733815; NZ_KB944444.1
1408; Streptomyces aurantiacus JA 4570 Seq28, whole genome shotgun sequence;
514916412; NZ_AOPZ01000028.1
1409; Streptomyces aurantiacus JA 4570 Seq17, whole genome shotgun sequence;
514916021; NZ_AOPZ01000017.1
1410; Enterococcus faecalis LA3B-2 Scaffold22, whole genome shotgun
sequence; 522837181; NZ_KE352807.1
1411; Paenibacillus alvei A6-6i-x PAAL66ix_14, whole genome shotgun
sequence; 528200987; ATMS01000061.1
1412; Dehalobacter sp. UNSWDHB Contig_139, whole genome shotgun
sequence; 544905305; NZ_AUUR01000139.1
1413; Actinobaculum sp. oral taxon 183 str. F0552 Scaffold15, whole genome
shotgun sequence; 545327527; NZ_KE951412.1
1414; Actinobaculum sp. oral taxon 183 str. F0552 A_P1HMPREF0043-1.0_Cont1.1,
whole genome shotgun sequence; 541476958; AWSB01000006.1
1415; Propionibacterium acidifaciens F0233 ctg1127964738299, whole genome
shotgun sequence; 544249812; ACVN02000045.1
1416; Rubidibacter lacunae KORDI 51-2 KR5l_contig00121, whole genome
shotgun sequence; 550281965; NZ_ASSJ01000070.1
1417; Rothia aeria F0184 R aerigIMPREF0742-1.0_Cont136.4, whole genome
shotgun sequence; 551695014; AXZG01000035.1
1418; Candidatus Halobonum tyrrellensis G22 contig00002, whole genome
shotgun sequence; 557371823; NZ_ASGZ01000002.1
1419; Blastomonas sp. CACIA14H2 contig00049, whole genome shotgun
sequence; 563282524; AYSC01000019.1
1420; Frankia sp. CcI6 CcI6DRAFT_scaffold_51.52, whole genome shotgun
sequence; 563312125; AYTZ01000052.1
1421; Frankia sp. CeD CEDDRAFT_scaffold_22.23, whole genome shotgun
sequence; 737947180; NZ_JPGU01000023.1
1422; Closltidium butyricum DORA_1 Q607_CBUC00058, whole genome
shotgun sequence; 566226100; AZLX01000058.1
1423; Streptococcus sp. DORA_10 Q617_SPSC00257, whole genome shotgun
sequence; 566231608; AZMH01000257.1
1424; Candidatus Entotheonella gemina TSY2_contig00559, whole genome
shotgun sequence; 575423213; AZHX01000559.1
1425; Streptomyces roseosporus NRRL 15998 supercont3.1 genomic scaffold,
whole genome shotgun sequence; 221717172; DS999644.1
1426; Frankia sp. CcI6 CcI6DRAFT_scaffold_51.52, whole genome shotgun
sequence; 563312125; AYTZ01000052.1
1427; Frankia sp. Thr ThrDRAFT_scaffold_28.29, whole genome shotgun
sequence; 602262270; JENI01000029.1
1428; Novosphingobium resinovorum strain KF1 contig000008, whole genome
shotgun sequence; 738615271; NZ_JFYZ01000008.1
1429; Brevundimonas abyssalis TAR-001 DNA, contig: BAB005, whole genome
shotgun sequence; 543418148; BATC01000005.1
1430; Bacillus akibai JCM 9157, whole genome shotgun sequence; 737696658;
NZ_BAUV01000025.1
1431; Bacillus boroniphilus JCM 21738 DNA, contig: contig_6, whole genome
shotgun sequence; 571146044; BAUW01000006.1
1432; Gracilibacillus boraciitolerans JCM 21714 DNA, contig:contig_30, whole
genome shotgun sequence; 575082509; BAVS01000030.1
1433; Bacterium endosymbiont of Mortierella elongata FMR23-6, whole genome
shotgun sequence; 779889750; NZ_DF850521.1
1434; Sphingopyxis sp. C-1 DNA, contig contig_1, whole genome shotgun
sequence; 834156795; BBRO01000001.1
1435; Sphingopyxis sp. C-1 DNA, contig contig_1, whole genome shotgun
sequence; 834156795; BBRO01000001.1
1436; Ideonella sakaiensis strain 201-F6, whole genome shotgun sequence;
928998724; NZ_BBYR01000007.1
1437; Brevundimonas sp. EAKA contig5, whole genome shotgun sequence;
737322991; NZ_JMQR01000005.1
1438; Streptomyces griseorubens strain JSD-1 contig143, whole genome shotgun
sequence; 657284919; JJMG01000143.1
1439; Frankia sp. CeD CEDDRAFT_scaffold_22.23, whole genome shotgun
sequence; 737947180; NZ_JPGU01000023.1
1440; Frankia sp. CcI6 CcI6DRAFT_scaffold_51.52, whole genome shotgun
sequence; 563312125; AYTZ01000052.1
1441; Frankia sp. CeD CEDDRAFT_scaffold_22.23, whole genome shotgun
sequence; 737947180; NZ_JPGU01000023.1
1442; Bifidobacterium callitrichos DSM 23973 contig4, whole genome shotgun
sequence; 759443001; NZ_JDUV01000004.1
1443; Streptomyces sp. JS01 contig2, whole genome shotgun sequence;
695871554; NZ_JPWW01000002.1
1444; Sphingopyxis sp. LC81 contig43, whole genome shotgun sequence;
686469310; JNFD01000038.1
1445; Sphingopyxis sp. LC81 contig24, whole genome shotgun sequence;
739659070; NZ_JNFD01000017.1
1446; Sphingopyxis sp. LC363 contig36, whole genome shotgun sequence;
739702045; NZ_JNFC01000030.1
1447; Burkholderia pseudomallei strain BEF DP42.Contig323, whole genome
shotgun sequence; 686949962; JPNR01000131.1
1448; Xanthomonas cannabis pv. phaseoli strain Nyagatare scf 52938_7, whole
genome shotgun sequence; 835885587; NZ_KN265462.1
1449; Burkholderia pseudomallei M5HR435 Y033.Contig530, whole genome
shotgun sequence; 715120018; JRFP01000024.1
1450; Candidatus Thiomargarita nelsonii isolate Hydrate Ridge contig_1164,
whole genome shotgun sequence; 723288710; JSZA01001164.1
1451; Novosphingobium sp. P6W scaffold9, whole genome shotgun sequence;
763095630; NZ_JXZE01000009.1
1452; Streptomyces griseus strain S4-7 contig113, whole genome shotgun
sequence; 764464761; NZ_JYBE01000113.1
1453; Peptococcaceae bacterium BRH c4b BRHa_1001357, whole genome
shotgun sequence; 780813318; LAD001000010.1
1454; Streptomyces rubellomurinus subsp. indigoferus strain ATCC 31304 contig-
55, whole genome shotgun sequence; 783374270; NZ_JZKG01000056.1
1455; Streptomyces sp. NRRL S-444 c0ntig322.4, whole genome shotgun
sequence; 797049078; JZWX01001028.1
1456; Candidate division TM6 bacterium GW2011_GWF2_36_131
US03_C0013, whole genome shotgun sequence; 818310996; LBRK01000013.1
1457; Sphingobium czechense LL01 25410_1, whole genome shotgun sequence;
861972513; JACT01000001.1
1458; Streptomyces caatingaensis strain CMAA 1322 contig02, whole genome
shotgun sequence; 906344334; NZ_LFXA01000002.1
1459; Paenibacillus polymyxa strain YUPP-8 scaffold32, whole genome shotgun
sequence; 924434005; LIYK01000027.1
1460; Burkholderi amallei GB8 horse 4 contig_394, whole genome shotgun
sequence; 67639376; NZ_AAHO01000116.1
1461; Streptomyces rimosus subsp. rimosus ATCC 10970 contig00312, whole
genome shotgun sequence; 441176881; NZ_ANSJ01000243.1
1462; Streptomyces rimosus subsp. rimosus ATCC 10970 contig00333, whole
genome shotgun sequence; 441178796; NZ_ANSJ01000259.1
1463; Streptomyces rimosus subsp. rimosus ATCC 10970 contig00312, whole
genome shotgun sequence; 441176881; NZ_ANSJ01000243.1
1464; Streptomyces rimosus subsp. rimosus ATCC 10970 contig00333, whole
genome shotgun sequence; 441178796; NZ_ANSJ01000259.1
1465; Streptomyces rimosus subsp. rimosus ATCC 10970 contig00333, whole
genome shotgun sequence; 441178796; NZ_ANSJ01000259.1
1466; Streptomyces rimosus subsp. rimosus ATCC 10970 contig00333, whole
genome shotgun sequence; 441178796; NZ_ANSJ01000259.1
1467; Streptomyces rimosus subsp. rimosus strain NRRL WC-3924 contig82.1,
whole genome shotgun sequence; 663379797; NZ_JOBW01000082.1
1468; Streptomyces sp. NRRL F-5755 P309contig7.1, whole genome shotgun
sequence; 926371541; NZ_LGCW01000295.1
1469; Streptomyces sp. NRRL F-5755 P309contig48.1, whole genome shotgun
sequence; 926371517; NZ_LGCW01000271.1
1470; Streptomyces sp. NRRL F-6491 P443contig15.1, whole genome shotgun
sequence; 925610911; LGEE01000058.1
1471; Streptomyces sp. NRRL S-444 contig322.4, whole genome shotgun
sequence; 797049078; JZWX01001028.1
1472; Actinobacteria bacterium OK074 ctg60, whole genome shotgun sequence;
930473294; NZ_LJCV01000275.1
1473; Betaproteobacteria bacterium 5G8 39 WOR 8-12 2589, whole genome
shotgun sequence; 931421682; LJTQ01000030.1
1474; Candidate division BRC1 bacterium SM23_51 WORSMTZ_10094 whole
genome shotgun sequence; 931536013; LJUL01000022.1
1475; Bacillus vietnamensis strain UCD-SED5 scaffold 15, whole genome
shotgun sequence; 933903534; LIXZ01000017.1
1476; Xanthomonas arboricola strain CITA 44 CITA_44_contig_26, whole
genome shotgun sequence; 937505789; NZ_LJGM01000026.1
1477; Xanthomonas sp. Mitacek01 contig_17, whole genome shotgun sequence;
941965142; NZ_LKIT01000002.1
1478; Erythrobacteraceae bacterium HL-111 ITZY_scaf_51, whole genome
shotgun sequence; 938259025; LJSW01000006.1
1479; Halomonas sp. HL-93 ITZY_scaf_415, whole genome shotgun sequence;
938285459; LJST01000237.1
1480; Paenibacillus sp. Soi1724D2 contig_11, whole genome shotgun sequence;
946400391; LMRY01000003.1
1481; Streptomyces silvensis strain ATCC 53525 53525_Assembly_Contig_22,
whole genome shotgun sequence; 970361514; LOCL01000028.1
1482; Bacillus cereus R309803 chromosome, whole genome shotgun sequence;
238801472; NZ_CM000720.1
1483; Streptococcus pneumoniae strain P18082 isolate E3GXY, whole genome
shotgun sequence; 935445269; NZ_CIEC02000098.1
1484; Streptococcus pneumoniae strain 37, whole genome shotgun sequence;
912676034; NZ_CMPZ01000004.1
1485; Bacillus cereus Rock3-44 chromosome, whole genome shotgun sequence;
238801485; NZ_CM000733.1
1486; Bacillus cereus VDM006 acrHb-supercont1.1, whole genome shotgun
sequence; 507060269; NZ_KB976864.1
1487; Bacillus cereus AH1271 chromosome, whole genome shotgun sequence;
238801491; NZ_CM000739.1
1488; Bacillus cereus VD115 supercont1.1, whole genome shotgun sequence;
423614674; NZ_JH792165.1
1489; Bacillus thuringiensis MC28, complete genome; 407703236; NC_018693.1
1490; Bacillus thuringiensis serovar andalousiensis BGSC 4AW1 chromosome,
whole genome shotgun sequence; 238801506; NZ_CM000754.1
1491; Bacillus cereus BAG3X2-1 supercont1.1, whole genome shotgun sequence;
423416528; NZ_JH791923.1
1492; Escherichia coli strain EC2_3 Contig93, whole genome shotgun sequence;
742921760; NZ_JWKL01000093.1
1493; Bacillus cereus NVH0597-99 gcontig2_1106483384196, whole genome
shotgun sequence; 196038187; NZ_ABDK02000003.1
1494; Bacillus cereus VD142 actaa-supercont2.2, whole genome shotgun
sequence; 514340871; NZ_KE150045.1
1495; Bacillus cereus BAG5X2-1 supercont1.1, whole genome shotgun sequence;
423456860; NZ_JH791975.1
1496; Bacillus cereus BAG60-2 supercont1.1, whole genome shotgun sequence;
423468694; NZ_JH804628.1
1497; Bacillus cereus HuA2-9 acqVt-supercont1.1, whole genome shotgun
sequence; 507020427; NZ_KB976152.1
1498; Bacillus cereus HuA3-9 acqVv-supercont1.4, whole genome shotgun
sequence; 507024338; NZ_KB976146.1
1499; Bacillus cereus MC67 supercont1.2, whole genome shotgun sequence;
423557538; NZ_JH792114.1
1500; Bacillus cereus AH621 chromosome, whole genome shotgun sequence;
238801471; NZ_CM000719.1
1501; Bacillus cereus VD107 supercont1.1, whole genome shotgun sequence;
423609285; NZ_JH792232.1
1502; Bacillus cereus VDM034 supercont1.1, whole genome shotgun sequence;
423666303; NZ_JH791809.1
1503; Enterococcus faecalis D6 supercont1.4, whole genome shotgun sequence;
242358782; NZ_GG688629.1
1504; Enterococcus faecalis EnGen0363 strain RMC5 acAqY-supercont1.4,
whole genome shotgun sequence; 502232520; NZ_KB944632.1
1505; Enterococcus faecalis TX1341 Scfld578, whole genome shotgun sequence;
422736691; NZ_GL457197.1
1506; Rhodobacter sphaeroides WS8N chromosome chrI, whole genome shotgun
sequence; 332561612; NZ_CM001161.1
1507; Ruminococcus albus 8 contig00035, whole genome shotgun sequence;
325680876; NZ_ADKM02000123.1
1508; Brevundimonas diminuta ATCC 11568 BDIM_scaffold00005, whole
genome shotgun sequence; 329889017; NZ_GL883086.1
1509; Brevundimonas diminuta 470-4 Scfld7, whole genome shotgun sequence;
444405902; NZ_KB291784.1
1510; Clostridium butyricum 5521 gcontig_1106103650482, whole genome
shotgun sequence; 182420360; NZ_ABDT01000120.2
1511; Clostridium butyricum strain HM-68 Contig83, whole genome shotgun
sequence; 760273878; NZ_JXBT01000001.1
1512; Xanthomonas citti pv. punicae str. LMG 859, whole genome shotgun
sequence; 390991205; NZ_CAGJ01000031.1
1513; Streptomyces clavuligerus ATCC 27064 supercont1.55, whole genome
shotgun sequence; 254392242; NZ_DS570678.1
1514; Streptomyces rimosus subsp. rimosus ATCC 10970 contig00312, whole
genome shotgun sequence; 441176881; NZ_ANSJ01000243.1
1515; Streptomyces rimosus subsp. rimosus ATCC 10970 contig00333, whole
genome shotgun sequence; 441178796; NZ_ANSJ01000259.1
1516; Streptomyces viridochromogenes DSM 40736 supercont1.1, whole genome
shotgun sequence; 224581107; NZ_GG657757.1
1517; Streptomyces viridochromogenes DSM 40736 supercont1.1, whole genome
shotgun sequence; 224581107; NZ_GG657757.1
1518; Streptomyces viridochromogenes Tue57 Seq127, whole genome shotgun
sequence; 443625867; NZ_AMLP01000127.1
1519; Methanobacterium formicicum DSM 3637 Contig04, whole genome
shotgun sequence; 408381849; NZ_AMP001000004.1
1520; Burkholderia mallei GB8 horse 4 contig_394, whole genome shotgun
sequence; 67639376; NZ_AAH001000116.1
1521; Sphingobium yanoikuyae ATCC 51230 supercont1.1, whole genome
shotgun sequence; 427407324; NZ_JH992904.1
1522; Sphingobium yanoikuyae strain SHJ scaffold2, whole genome shotgun
sequence; 893711333; NZ_KQ235984.1
1523; Burkholderia mallei GB8 horse 4 contig_394, whole genome shotgun
sequence; 67639376; NZ_AAH001000116.1
1524; Burkholderia pseudomallei 1710b chromosome 1, complete sequence;
76808520; NC_007434.1
1525; Burkholderia pseudomallei 1258a Contig0089, whole genome shotgun
sequence; 418540998; NZ_AHJB01000089.1
1526; Burkholderia pseudomallei strain BEF DP42.Contig323, whole genome
shotgun sequence; 686949962; JPNR01000131.1
1527; [Eubacterium] cellulosolvens 6 chromosome, whole genome shotgun
sequence; 389575461; NZ_CM001487.1
1528; Streptomyces mobaraensis NBRC 13819 = DSM 40847 contig024, whole
genome shotgun sequence; 458977979; NZ_AORZ01000024.1
1529; Streptomyces mobaraensis NBRC 13819 = DSM 40847 contig079, whole
genome shotgun sequence; 458984960; NZ_AORZ01000079.1
1530; Amycolatopsis azurea DSM 43854 contig60, whole genome shotgun
sequence; 451338568; NZ_ANMG01000060.1
1531; Streptomyces pristinaespiralis ATCC 25486 chromosome, whole genome
shotgun sequence; 297189896; NZ_CM000950.1
1532; Xanthomonas axonopodis pv. malvacearum str. GSPB1386
1386_Scaffold6, whole genome shotgun sequence; 418516056; NZ_AHIB01000006.1
1533; Burkholderia thailandensis MSMB43 Scaffold3, whole genome shotgun
sequence; 424903876; NZ_JH692063.1
1534; Xanthomonas gardneri ATCC 19865 XANTHO7DRAF_Contig52, whole
genome shotgun sequence; 325923334; NZ_AEQX01000392.1
1535; Leptolyngbya sp. PCC 7375 Lepto7375DRAFT_LPA.5, whole genome
shotgun sequence; 427415532; NZ_JH993797.1
1536; Streptomyces auratus AGR0001 Scaffold1, whole genome shotgun
sequence; 398790069; NZ_JH725387.1
1537; Halosimplex carlsbadense 2-9-1 contig_4, whole genome shotgun sequence;
448406329; NZ_AOIU01000004.1
1538; Rothia aeria F0474 contig00003, whole genome shotgun sequence;
383809261; NZ_AJJQ01000036.1
1539; Sphingobium japonicum BiD32, whole genome shotgun sequence;
494022722; NZ_CAVK010000217.1
1540; Amycolatopsis decaplanina DSM 44594 Contig0055, whole genome
shotgun sequence; 458848256; NZ_AOH001000055.1
1541; Fictibacillus macauensis ZFHKF-1 Contig20, whole genome shotgun
sequence; 392955666; NZ_AKKV01000020.1
1542; Paenibacillus sp. Aloe-11 GW8_15, whole genome shotgun sequence;
375307420; NZ_JH601049.1
1543; Rhodanobacter denitrificans strain 116-2 contig032, whole genome shotgun
sequence; 389798210; NZ_AJXV01000032.1
1544; Caulobacter sp. AP07 PMI01_contig_53.53, whole genome shotgun
sequence; 399069941; NZ_AKKF01000033.1
1545; Novosphingobium sp. AP12 PMI02_contig_78.78, whole genome shotgun
sequence; 399058618; NZ_AKKE01000021.1
1546; Sphingobium sp. AP49 PMI04_contig490.490, whole genome shotgun
sequence; 398386476; NZ_AJVL01000086.1
1547; Moorea producens 3L scf52054, whole genome shotgun sequence;
332710503; NZ_GL890955.1
1548; Rhodanobacter sp. 115 contig437, whole genome shotgun sequence;
389759651; NZ_AJXS01000437.1
1549; Pedobacter sp. BAL39 1103467000500, whole genome shotgun sequence;
149277003; NZ_ABCM01000004.1
1550; Pedobacter sp. BAL39 1103467000492, whole genome shotgun sequence;
149277373; NZ_ABCM01000005.1
1551; Sulfurovum sp. AR contig00449, whole genome shotgun sequence;
386284588; NZ_AJLE01000006.1
1552; Mucilaginibacter paludis DSM 18603 chromosome, whole genome shotgun
sequence; 373951708; NZ_CM001403.1
1553; Magnetospirillum caucaseum strain SO-1 contig00006, whole genome
shotgun sequence; 458904467; NZ_AONQ01000006.1
1554; Streptomyces sp. Mg1 supercont1.100, whole genome shotgun sequence;
254387191; NZ_DS570483.1
1555; Sphingomonas sp. LH128 Contig3, whole genome shotgun sequence;
402821166; NZ_ALVC01000003.1
1556; Sphingomonas sp. LH128 Contig8, whole genome shotgun sequence;
402821307; NZ_ALVC01000008.1
1557; Streptomyces sp. AA4 supercont1.3, whole genome shotgun sequence;
224581098; NZ_GG657748.1
1558; Cecembia lonarensis LW9 contig000133, whole genome shotgun sequence;
406663945; NZ_AMGM01000133.1
1559; Actinomyces sp. oral taxon 848 str. F0332 Scfld0, whole genome shotgun
sequence; 260447107; NZ_GG703879.1
1560; Streptomyces ipomoeae 91-03 gcontig_1108499715961, whole genome
shotgun sequence; 429196334; NZ_AEJC01000180.1
1561; Frankia sp. QA3 chromosome, whole genome shotgun sequence;
392941286; NZ_CM001489.1
1562; Fischerella thermalis PCC 7521 contig00099, whole genome shotgun
sequence; 484076371; NZ_AJLL01000098.1
1563; Rhodobacter sp. AKP1 contig19, whole genome shotgun sequence;
429208285; NZ_ANFS01000019.1
1564; Rubrivivax benzoatilyticus JA2 = ATCC BAA-35 strain JA2 contig_155,
whole genome shotgun sequence; 332527785; NZ_AEWG01000155.1
1565; Burkholderia thailandensis E555 BTHE555_314, whole genome shotgun
sequence; 485035557; NZ_AECNO1000315.1
1566; Burkholdefia thailandensis E555 BTHE555 314, whole genome shotgun
sequence; 485035557; NZ_AECNO1000315.1
1567; Streptomyces chartreusis NRRL 12338 12338 Doro1_scaffold19, whole
genome shotgun sequence; 381200190; NZ_JH164855.1
1568; Streptomyces globisporus C-1027 Scaffold24_1, whole genome shotgun
sequence; 410651191; NZ_AJUO01000171.1
1569; Streptomyces roseosporus NRRL 15998 supercont3.1 genomic scaffold,
whole genome shotgun sequence; 221717172; DS999644.1
1570; Burkholdefia oklahomensis EO147 PMP6xxBPSxxE0147-248, whole
genome shotgun sequence; 149146238; NZ_ABBF01000248.1
1571; Burkholdefia oklahomensis C6786 PMP6xxBOKxxC6786-168, whole
genome shotgun sequence; 149147045; NZ_ABBG01000168.1
1572; Candidatus Odyssella thessalonicensis L13 HMO_scaffold00016, whole
genome shotgun sequence; 343957487; NZ_AEWF01000005.1
1573; Candidatus Odyssella thessalonicensis L13 HMO_scaffold00016, whole
genome shotgun sequence; 343957487; NZ_AEWF01000005.1
1574; Sphingobium yanoikuyae XLDN2-5 contig000022, whole genome shotgun
sequence; 378759068; NZ_AFXE01000022.1
1575; Sphingobium yanoikuyae XLDN2-5 contig000029, whole genome shotgun
sequence; 378759075; NZ_AFXE01000029.1
1576; Paenibacillus peofiae KCTC 3763 contig9, whole genome shotgun
sequence; 389822526; NZ_AGFX01000048.1
1577; Citromicrobium sp. JLT1363 contig00009, whole genome shotgun
sequence; 341575924; NZ_AEUE01000009.1
1578; Acaryochlofis sp. CCMEE 5410 contig00232, whole genome shotgun
sequence; 359367134; NZ__AFEJ01000154.1
1579; Stenotrophomonas maltophilia strain 419_SMAL
707_128228_1961615_4_642_523_, whole genome shotgun sequence;
896535166; NZ_JVHW01000017.1
1580; Streptomyces sp. S4, whole genome shotgun sequence; 358468601;
NZ_FR873700.1
1581; Pandoraea sp. 5D6-2 scaffold29, whole genome shotgun sequence;
505733815; NZ_KB944444.1
1582; Mesorhizobium loti MAFF303099 DNA, complete genome; 57165207;
NC_002678.2
1583; Streptomyces avermitilis MA-4680 = NBRC 14893, complete genome;
162960844; NC_003155 .4
1584; Thermobifida fusca TM51 contig028, whole genome shotgun sequence;
510814910; NZ_AOSG01000028.1
1585; Rhodobacter sphaeroides 2.4.1 chromosome 1, whole genome shotgun
sequence; 482849861; NZ_AKBU01000001.1
1586; Rhodospirillum rubrum F11, complete genome; 386348020; NC_017584.1
1587; Rhodospirillum rubrum F11, complete genome; 386348020; NC_017584.1
1588; Frankia sp. CcI6 CcI6DRAFT_scaffold_51.52, whole genome shotgun
sequence; 563312125; AYTZ01000052.1
1589; Roseobacter denitfificans OCh 114, complete genome; 110677421;
NC_008209.1
1590; Rhodobacter sphaeroides ATCC 17029 chromosome 1, complete sequence;
126460778; NC_009049.1
1591; Rhodobacter sphaeroides ATCC 17025, complete genome; 146276058;
NC_009428.1
1592; Streptococcus suis SC84 complete genome, strain SC84; 253750923;
NC_012924.1
1593; Geobacter uraniireducens Rf4, complete genome; 148262085;
NC_009483.1
1594; Sulfurovum sp. NBC37-1 genomic DNA, complete genome; 152991597;
NC_009663.1
1595; Acaryochloris marina MBIC11017, complete genome; 158333233;
NC_009925.1
1596; Bacillus weihenstephanensis KBAB4, complete genome; 163938013;
NC_010184.1
1597; Caulobacter sp. K31 plasmid pCAUL01, complete sequence; 167621728;
NC_010335.1
1598; Caulobacter sp. K31, complete genome; 167643973; NC_010338.1
1599; Candidatus Amoebophilus asiaticus 5a2, complete genome; 189501470;
NC_010830.1
1600; Stenotrophomonas maltophilia R551-3, complete genome; 194363778;
NC_011071.1
1601; Cyanothece sp. PCC 7425, complete genome; 220905643; NC_011884.1
1602; Chitinophaga pinensis DSM 2588, complete genome; 256419057;
NC_013132.1
1603; Haliangium ochraceum DSM 14365, complete genome; 262193326;
NC_013440.1
1604; Thermobaculum terrenum ATCC BAA-798 chromosome 2, complete
sequence; 269838913; NC_013526.1
1605; Xylanimonas cellulosilytica DSM 15894, complete genome; 269954810;
NC_013530.1
1606; Stackebrandtia nassauensis DSM 44728, complete genome; 291297538;
NC_013947.1
1607; Sphingobium japonicum UT26S DNA, chromosome 1, complete genome;
294009986;
1608; Sphingobium japonicum UT26S plasmid pCHQ1 DNA, complete genome;
294023656; NC_014007.1
1609; Butyrivibrio proteoclasticus B316 chromosome 1, complete sequence;
302669374; NC_014387.1
1610; Paenibacillus jamilae strain NS115 contig_27, whole genome shotgun
sequence; 970428876; NZ_LDRX01000027.1
1611; Frankia inefficax, complete genome; 312193897; NC_014666.1
1612; Asticcacaulis excentricus CB 48 chromosome 1, complete sequence;
315497051; NC_014816.1
1613; Teniglobus saanensis SP1PR4, complete genome; 320105246;
NC_014963.1
1614; Methanobacterium lacus strain AL-21, complete genome; 325957759;
NC_015216.1
1615; Marinomonas meditenanea MMB-1, complete genome; 326793322;
NC_015276.1
1616; Desulfobacca acetoxidans DSM 11109, complete genome; 328951746;
NC_015388.1
1617; Methanobacterium paludis strain SWAN1, complete genome; 333986242;
NC_015574.1
1618; Frankia symbiont of Datisca glomerata, complete genome; 336176139;
NC_015656.1
1619; Halopiger xanaduensis SH-6 plasmid pHALXA01, complete genome;
336251750; NC_015658.1
1620; Mesorhizobium opportunistum WSM2075, complete genome; 337264537;
NC_015675.1
1621; Runella slithyformis DSM 19594, complete genome; 338209545;
NC_015703.1
1622; Roseobacter litoralis Och 149, complete genome; 339501577;
NC_015730.1
1623; Streptomyces violaceusniger Tu 4113 plasmid pSTRVI01, complete
sequence; 345007457; NC_015951.1
1624; Streptomyces violaceusniger Tu 4113, complete genome; 345007964;
NC_015957.1
1625; Sphingobium sp. SYK-6 DNA, complete genome; 347526385;
NC_014006.1 NC_015976.1
1626; Chloracidobacterium thermophilum B chromosome 1, complete sequence;
347753732; NCO16024.1
1627; Kitasatospora setae KM-6054 DNA, complete genome; 357386972;
NC_016109.1
1628; Streptomyces cattleya str. NRRL 8057 main chromosome, complete
genome; 357397620; NC_016111.1
1629; Legionella pneumophila subsp. pneumophila ATCC 43290, complete
genome; 378775961; NC_016811.1
1630; Rubrivivax gelatinosus IL144 DNA, complete genome; 383755859;
NC_017075.1
1631; Francisella cf novicida 3523, complete genome; 387823583; NC_017449.1
1632; Rhodospirillum rubrum F11, complete genome; 386348020; NC_017584.1
1633; Actinoplanes sp. SE50/110, complete genome; 386845069; NC_017803.1
1634; Legionella pneumophila subsp. pneumophila str. Lonaine chromosome,
complete genome; 397662556; NC_018139.1
1635; Emticicia oligotrophica DSM 17448, complete genome; 408671769;
NC_018748.1
1636; Streptomyces venezuelae ATCC 10712 complete genome; 408675720;
NC_018750.1
1637; Nostoc sp. PCC 7107, complete genome; 427705465; NC_019676.1
1638; Nostoc sp. PCC 7524, complete genome; 427727289; NC_019684.1
1639; Crinalium epipsammum PCC 9333, complete genome; 428303693;
NC_019753.1
1640; Thermobacillus composti KWC4, complete genome; 430748349;
NC_019897.1
1641; Mesorhizobium australicum WSM2073, complete genome; 433771415;
NC_019973.1
1642; Desulfocapsa sulfexigens DSM 10523, complete genome; 451945650;
NC_020304.1
1643; Rhodanobacter denitrificans strain 2APBS1, complete genome; 469816339;
NC_020541.1
1644; Burkholderia thailandensis MSMB121 chromosome 1, complete sequence;
488601775;
1645; Streptomyces fulvissimus DSM 40593, complete genome; 488607535;
NC_021177.1
1646; Streptomyces davawensis strain JCM 4913 complete genome; 471319476;
NC_020504.1
1647; Streptomyces davawensis strain JCM 4913 complete genome; 471319476;
NC_020504.1
1648; Desulfotomaculum acetoxidans DSM 771, complete genome; 258513366;
NC_013216.1
1649; Desulfotomaculum acetoxidans DSM 771, complete genome; 258513366;
NC_013216.1
1650; Actinosynnema mirum DSM43827, complete genome; 256374160;
NC_013093.1
1651; Bacillus cereus BAG20-3 acfXF-supercont1.1, whole genome shotgun
sequence; 507017505; NZ_KB976530.1
1652; Bacillus cereus VD118 acrHo-supercont1.9, whole genome shotgun
sequence; 507035131; NZ_KB976800.1
1653; Bacillus cereus VDM053 acrGS-supercont1.7, whole genome shotgun
sequence; 507060152; NZ_KB976714.1
1654; Halomonas anticariensis FP35 = DSM 16096 strain FP35 Scaffold', whole
genome shotgun sequence; 514429123; NZ_KE332377.1
1655; Halomonas anticariensis FP35 = DSM 16096 strain FP35 Scaffold', whole
genome shotgun sequence; 514429123; NZ_KE332377.1
1656; Streptomyces sp. NRRL F-5639 contig75.1, whole genome shotgun
sequence; 664515060; NZ_JOGK01000075.1
1657; Acinetobacter gyllenbergii MTCC 11365 contigl, whole genome shotgun
sequence; 514348304; NZ_ASQH01000001.1
1658; Streptomyces aurantiacus JA 4570 Seq17, whole genome shotgun sequence;
514916021; NZ_AOPZ01000017.1
1659; Streptomyces aurantiacus JA 4570 Seq28, whole genome shotgun sequence;
514916412; NZ_AOPZ01000028.1
1660; Streptomyces aurantiacus JA 4570 Seq63, whole genome shotgun sequence;
514917321; NZ_AOPZ01000063.1
1661; Streptomyces aurantiacus JA 4570 Seq109, whole genome shotgun
sequence; 514918665; NZ_AOPZ01000109.1
1662; Paenibacillus polymyxa OSY-DF Contig136, whole genome shotgun
NC_021173.1 sequence; 484036841; NZ_AIPP01000136.1
1663; Fischerella muscicola SAG 1427-1 = PCC 73103 contig00215, whole
genome shotgun sequence; 484073367; NZ_AJLJ01000207.1
1664; Fischerella muscicola PCC 7414 contig00153, whole genome shotgun
sequence; 484075372; NZ_AJLK01000153.1
1665; Xanthomonas arboricola pv. corylina str. NCCB 100457 Contig50, whole
genome shotgun sequence; 507418017; NZ_APMCO2000050.1
1666; Sphingobium xenophagum QYY contig015, whole genome shotgun
sequence; 484272664; NZ_AKM01000015.1
1667; Pedobacter arcticus A12 Scaffold2, whole genome shotgun sequence;
484345004; NZ_JH947126.1
1668; Leptolyngbya boryana PCC 6306 LepboDRAFT_LPC.1, whole genome
shotgun sequence; 482909028; N_KB731324.1
1669; Fischerella sp. PCC 9339 PCC9339DRAFT_scaffold1.1, whole genome
shotgun sequence; 482909394; NZJI-1992898.1
1670; Mastigocladopsis repens PCC 10914 Mas10914DRAFT_scaffold1.1, whole
genome shotgun sequence; 482909462; NZ_J14992901.1
1671; Lactococcus garvieae Tac2 Tac2Contig_33, whole genome shotgun
sequence; 483258918; NZ_AMFE01000033.1
1672; Paenisporosarcina sp. TG-14 111.TG14.1_1, whole genome shotgun
sequence; 483299154; NZ_AMGD01000001.1
1673; Amphibacillus jilinensis Y1 Scaffold2, whole genome shotgun sequence;
483992405; NZ_JH976435.1
1674; Alpha proteobacterium LLX12A LLX12A_contig00014, whole genome
shotgun sequence; 483996931; NZ_AMYX01000014.1
1675; Alpha proteobacterium LLX12A LLX12A_contig00026, whole genome
shotgun sequence; 483996974; NZ_AMYX01000026.1
1676; Alpha proteobacterium LLX12A LLX12A_contig00084, whole genome
shotgun sequence; 483997176; NZ_AMYX01000084.1
1677; Alpha proteobacterium L4 1A L41A_contig00002, whole genome shotgun
sequence; 483997957; NZ_AMYY01000002.1
1678; Nocardiopsis alba DSM 43377 contig_34, whole genome shotgun
sequence; 484007204; NZ_ANAC01000034.1
1679; Nocardiopsis halophila DSM 44494 contig_138, whole genome shotgun
sequence; 484007841; NZ_ANAD01000138.1
1680; Nocardiopsis halophila DSM 44494 contig_197, whole genome shotgun
sequence; 484008051; NZ_ANAD01000197.1
1681; Nocardiopsis halotolerans DSM 44410 contig_372, whole genome shotgun
sequence; 484016556; NZ_ANAX01000372.1
1682; Nocardiopsis lucentensis DSM 44048 contig_935, whole genome shotgun
sequence; 484021665; NZ_ANBC01000935.1
1683; Nocardiopsis alkaliphila YIM 80379 contig_111, whole genome shotgun
sequence; 484022237; NZ_ANBD01000111.1
1684; Nocardiopsis chromatogenes YIM 90109 contig_93, whole genome
shotgun sequence; 484026206; NZ_ANBH01000093.1
1685; Porphyrobacter sp. AAP82 Contig35, whole genome shotgun sequence;
484033307; NZ_ANFX01000035.1
1686; Blastomonas sp. AAP53 Contig8, whole genome shotgun sequence;
484033611; NZ_ANFZ01000008.1
1687; Blastomonas sp. AAP53 Contig14, whole genome shotgun sequence;
484033631; NZ_ANFZ01000014.1
1688; Paenibacillus sp. PAMC 26794 5104_29, whole genome shotgun sequence;
484070054; NZ_ANHX01000029.1
1689; Oscillatoria sp. PCC 10802 Osc10802DRAFT_Contig7.7, whole genome
shotgun sequence; 484104632; NZ_KB235948.1
1690; Clostridium botulinum CB11/1-1 CB contig00105, whole genome shotgun
sequence; 484141779; NZ_AORM01000006.1
1691; Actinopolyspora halophila DSM 43834 ActhaDRAFT_contig1.1_C, whole
genome shotgun sequence; 484203522; NZ_AQUI01000002.1
1692; Asticcacaulis benevestitus DSM 16100 =ATCC BAA-896 strain DSM
16100 B060DRAFT_scaffold_12.13_C, whole genome shotgun sequence;
484226753; NZ_AQWM01000013.1
1693; Asticcacaulis benevestitus DSM 16100 = ATCC BAA-896 strain DSM
16100 B060DRAFT_scaffold_31.32S, whole genome
484226810; NZ_AQWM01000032.1
1694; Streptomyces sp. FxanaC1 B074DRAFT_scaffold_1.2_C, whole genome
shotgun sequence; 484227180; NZ_AQW001000002.1
1695; Streptomyces sp. FxanaC1 B074DRAFT_scaffold_7.8_C, whole genome
shotgun sequence; 484227195; NZ_AQW001000008.1
1696; Smamgdicoccus niigatensis DSM 44881 =NBRC 103563 strain DSM
44881 F600DRAFT_scaffold00011.11_C, whole genome shotgun sequence;
484234624; NZ_AQXZ01000009.1
1697; Verrucomicrobium sp. 3C A37ADRAFT_scaffold1.1, whole genome
shotgun sequence; 483219562; NZ_KB901875.1
1698; Verrucomicrobium sp. 3C A37ADRAFT_scaffold1.1, whole genome
shotgun sequence; 483219562; NZ_KB901875.1
1699; Bradyrhizobium sp. WSM2793 A3ASDRAFT_scaffold_24.25, whole
genome shotgun sequence; 483314733; NZ_KB902785.1
1700; Streptomyces vitaminophilus DSM 41686 A3IGDRAFT_scaffold_10.11,
whole genome shotgun sequence; 483682977; NZ_KB904636.1
1701; Streptomyces sp. CcalMP-8W B053DRAFT_scaffold_17.18, whole
genome shotgun sequence; 483961830; NZ_KB890924.1
1702; Streptomyces sp. ScaeMP-e10 B061DRAFT scaffold_01, whole genome
shotgun sequence; 483967534; NZ_KB891296.1
1703; Streptomyces sp. KhCrAH-244 B069DRAFT_scaffold_11.12, whole
genome shotgun sequence; 483969755; NZ_KB891596.1
1704; Streptomyces sp. HmicA12 B072DRAFT_scaffold_19.20, whole genome
shotgun sequence; 483972948; NZ_KB891808.1
1705; Streptomyces sp. MspMP-M5 B073DRAFT_scaffold 27.28, whole
genome shotgun sequence; 483974021; NZ_KB891893.1
1706; Bacillus mycoides strain Flugge 10206 DJ94.contig-100_16, whole genome
shotgun sequence; 727343482; NZ_JMQD01000030.1
1707; Streptomyces sp. CNY228 D330DRAFT_scaffold00011.11, whole genome
shotgun sequence; 484057944; NZ_KB898231.1
1708; Streptomyces sp. CNB091 D581DRAFT_scaffold00010.10, whole genome
shotgun sequence; 484070161; NZ_KB898999.1
1709; Sphingobium xenophagum NBRC 107872, whole genome shotgun
sequence; 483527356; NZ_BARE01000016.1
1710; Sphingobium xenophagum NBRC 107872, whole genome shotgun
shotgun sequence; sequence; 483532492; NZ_BARE01000100.1
1711; Bacillus oceanisediminis 2691 contig2644, whole genome shotgun
sequence; 485048843; NZ_ALEG01000067.1
1712; Bacillus sp. REN51N contig_2, whole genome shotgun sequence;
748816024; NZ_JXAB01000002.1
1713; Calothrix sp. PCC 7103 Cal7103DRAFT_CPM.6, whole genome shotgun
sequence; 485067373; NZ_KB217478.1
1714; Pseudanabaena sp. PCC 6802 Pse6802_scaffold_5, whole genome shotgun
sequence; 485067426; NZ_KB235914.1
1715; Actinopolyspora mortivallis DSM 44261 strain HS-1
ActmoDRAFT_scaffold1.1, whole genome shotgun sequence; 486324513;
NZ_KB913024.1
1716; Mesorhizobium huakuii 7653R genome; 657121522; CP006581.1
1717; Paenibacillus sp. FIW567 B212DRAFT_scaffold1.1, whole genome
shotgun sequence; 486346141; NZ_KB910518.1
1718; Bacillus sp. 123MFChir2 H280DRAFT scaffold00030.30, whole genome
shotgun sequence; 487368297; NZ_KB910953.1
1719; Streptomyces canus 299MFChir4.1 H293DRAFT_scaffold00032.32, whole
genome shotgun sequence; 487385965; NZ_KB911613.1
1720; Kribbella catacumbae DSM 19601 A3ESDRAFT scaffold_7.8_C, whole
genome shotgun sequence; 484207511; NZ_AQUZ01000008.1
1721; Paenibacillus riograndensis SBR5 Contig78, whole genome shotgun
sequence; 485470216; NZ__A
1722; Nonomumea coxensis DSM 45129 A3G7DRAFT_scaffold_4.5, whole
genome shotgun sequence; 483454700; NZ_KB903974.1
1723; Spirosoma spitsbergense DSM 19989 B157DRAFT_scaffold_76.77, whole
genome shotgun sequence; 483994857; NZ_KB893599.1
1724; Amycolatopsis alba DSM 44262 scaffold1, whole genome shotgun
sequence; 486330103; NZ_KB913032.1
1725; Amycolatopsis nigrescens CSC17Ta-90 AmyniDRAFT_Contig68.1_C,
whole genome shotgun sequence; 487404592; NZ_ARVW01000001.1
1726; Reyranella massiliensis 521, whole genome shotgun sequence; 484038067;
NZ_HE997181.1
1727; Acidobacteriaceae bacterium KBS 83 G002DRAFT_scaffold00007.7,
whole genome shotgun sequence; 485076323; NZ_KB906739.1
1728; Novosphingobium lindaniclasticum LE124 contig147, whole genome
shotgun sequence; 544819688; NZ_ATHL01000147.1
1729; Actinobaculum sp. oral taxon 183 str. F0552 A_P1HMPREF0043-
1.0_Cont1.1, whole genome shotgun sequence; 541476958; AWSB01000006.1
1730; Sphingomonas-like bacterium B12, whole genome shotgun sequence;
484113405; NZ_BACX01000237.1
1731; Sphingomonas-like bacterium B12, whole genome shotgun sequence;
484113491; NZ_BACX01000258.1
1732; Thermoactinomyces vulgaris strain NRRL F-5595 F5595contig15.1, whole
genome shotgun sequence; 929862756; NZ_LGKI01000090.1
1733; Closltidium saccharobutylicum DSM 13864, complete genome;
550916528; NC_022571.1
1734; Butyrivibrio fibrisolvens AB2020 G616DRAFT_scaffold00015.15_C,
whole genome shotgun sequence; 551012921; NZ_ATVZ01000015.1
1735; Butyrivibrio sp. XPD2006 G590DRAFT_scaffold00008.8_C, whole
genome shotgun sequence; 551021553; NZ_ATVT01000008.1
1736; Butyrivibrio sp. AE3009 G588DRAFT_scaffold00030.30_C, whole
genome shotgun sequence; 551035505; NZ_ATVS01000030.1
1737; Acidobacteriaceae bacterium TAA166 strain TAA 166
H979DRAFT_scaffold_0.1S, whole genome shotgun sequence; 551216990;
NZ_ATWD01000001.1
1738; Rothia aeria F0184 R_aeriaHMPREF0742-1.0_Cont136.4, whole genome
shotgun sequence; 551695014; AXZG01000035.1
1739; Klebsiella pneumoniae 4541-2 4541_2_67, whole genome shotgun
sequence; 657698352; NZ_JDW001000067.1
1740; Klebsiella pneumoniae MGH 19 addTc-supercont1.2, whole genome
shotgun sequence; 556494858; NZ_KI535678.1
1741; Candidatus Halobonum tyrrellensis G22 contig00002, whole genome
shotgun sequence; 557371823; NZ_ASGZ01000002.1
1742; Asticcacaulis sp. AC466 contig00008, whole genome shotgun sequence;
557833377; NZ_AWGE01000008.1
1743; Asticcacaulis sp. AC466 contig00033, whole genome shotgun sequence;
557835508; NZ_AWGE01000033.1
1744; Asticcacaulis sp. YBE204 contig00005, whole genome shotgun sequence;
557839256; NZ_AWGF01000005.1
1745; Asticcacaulis sp. YBE204 contig00010, whole genome shotgun sequence;
557839714; NZ_AWGF01000010.1
1746; Streptomyces roseochromogenus subsp. oscitans DS 12.976 chromosome,
whole genome shotgun sequence; 566155502; NZ_CM002285.1
1747; Bacillus boroniphilus JCM 21738 DNA, contig: contig_6, whole genome
shotgun sequence; 571146044; BAUW01000006.1
1748; Mesorhizobium sp. LNHC232B00 scaffold0020, whole genome shotgun
sequence; 563561985; NZ_AYWP01000020.1
1749; Mesorhizobium sp. LNHC220B00 scaffold0002, whole genome shotgun
sequence; 563576979; NZ_AYWS01000002.1
1750; Mesorhizobium sp. LNHC221B00 scaffold0001, whole genome shotgun
sequence; 563570867; NZ_AYWR01000001.1
1751; Clostridium pasteurianum NRRL B-598, complete genome; 930593557;
NZ_CP011966.1
1752; Paenibacillus peoriae strain HS311, complete genome; 922052336;
NZ_CP011512.1
1753; Magnetospirillum gryphiswaldense MSR-1 v2, complete genome;
568144401; NC_023065.1
1754; Streptococcus suis strain LS8F, whole genome shotgun sequence;
766589647; NZ_CEHJ01000007.1
1755; Bradyrhizobium sp. ARR65 BraARR65DRAFT_scaffold_9.10_C, whole
genome shotgun sequence; 639168743; NZ_AWZU01000010.1
1756; Paenibacillus sp. MAEPY2 contig7, whole genome shotgun sequence;
639451286; NZ_AWUK01000007.1
1757; Verrucomicrobia bacterium LP2A G346DRAFT_scf7180000000012_quiver.2_C,
whole genome shotgun sequence; 640169055; NZ_JAFS01000002.1
1758; Verrucomicrobia bacterium LP2A G346DRAFT_scf7180000000012_quiver.2_C,
whole genome shotgun sequence; 640169055; NZ_JAFS01000002.1
1759; Robbsia andropogonis Ba3549 160, whole genome shotgun sequence;
640451877; NZ_AYSW01000160.1
1760; Xanthomonas arboricola 3004 contig00003, whole genome shotgun
sequence; 640500871; NZ_AZQY01000003.1
1761; Bacillus mannanilyticus JCM 10596, whole genome shotgun sequence;
640600411; NZ_BAMO01000071.1
1762; Bacillus sp. H1a Contig_1, whole genome shotgun sequence; 640724079;
NZ_AYMH01000001.1
1763; Enterococcus faecalis ATCC 4200 supercont1.2, whole genome shotgun
sequence; 239948580; NZ_GG670372.1
1764; Haloglycomyces albus DSM 45210 HalalDRAFT chromosome 1.1_C,
whole genome shotgun sequence; 644043488; NZ_AZUQ01000001.1
1765; Sphingomonas sanxanigenens NX02, complete genome; 749321911;
NZ_CP006644.1
1766; Kutzneria albida strain NRRL B-24060 contig305.1, whole genome shotgun
sequence; 662161093; NZ_JNYH01000515.1
1767; Kutzneria albida DSM 43870, complete genome; 754862786;
NZ_CP007155.1
1768; Paenibacillus sp. ICGEB2008 Contig_7, whole genome shotgun sequence;
483624383; NZ_AMQUO1000007.1
1769; Sphingobium barthaii strain KK22, whole genome shotgun sequence;
646529442; NZ_BATN01000092.1
1770; Paenibacillus polymyxa 1-43 S143_contig00221, whole genome shotgun
sequence; 647225094; NZ_ASRZ01000173.1
1771; Paenibacillus graminis RSA19 S2_contig00597, whole genome shotgun
sequence; 647256651; NZ_ASSG01000304.1
1772; Paenibacillus polymyxa TD94 STD94_contig00759, whole genome
shotgun sequence; 647274605; NZ_ASSA01000134.1
1773; Bacillus flexus T6186-2 contig_106, whole genome shotgun sequence;
647636934; NZ_JANV01000106.1
1774; Brevundimonas naejangsanensis strain B1 contig000018, whole genome
shotgun sequence; 647728918; NZ_JHOF01000018.1
1775; Sphingomonas-like bacterium B12, whole genome shotgun sequence;
484115568; NZ_BACX01000797.1
1776; Nocardiopsis potens DSM 45234 contig_25, whole genome shotgun
sequence; 484017897; NZ_ANBB01000025.1
1777; Nocardiopsis halotolerans DSM 44410 contig_26, whole genome shotgun
sequence; 484015294; NZ_ANAX01000026.1
1778; Nocardiopsis baichengensis YIM 90130 Scaffold15_1, whole genome
shotgun sequence; 484012558; NZ_ANAS01000033.1
1779; Nocardiopsis alba DSM 43377 contig_10, whole genome shotgun
sequence; 484007121; NZ_ANAC01000010.1
1780; Sphingomonas melonis DAPP-PG 224 Sphme3DRAFT_scaffold1.1, whole
genome shotgun sequence; 482984722; NZ_KB900605.1
1781; Acidobacteriaceae bacterium TAA166 strain TAA 166
H979DRAFT_scaffold_0.1S, whole genome shotgun sequence; 551216990;
NZ_ATWD01000001.1
1782; Actinomadura oligospora ATCC 43269 P696DRAFT_scaffold00008.8_C,
whole genome shotgun sequence; 651281457; NZ_JADG01000010.1
1783; Butyrivibrio sp. XPD2002 G587DRAFT scaffold00011.11, whole genome
shotgun sequence; 651381584; NZ_KE384117.1
1784; Bacillus sp. UNC437CL72CviS29 M014DRAFT_scaffold00009.9_C,
whole genome shotgun sequence; 651596980; NZ_AXVB01000011.1
1785; Butyrivibrio sp. FC2001 G601DRAFT_scaffold00001.1, whole genome
shotgun sequence; 651921804; NZ_KE384132.1
1786; Bacillus bogoriensis ATCC BAA-922 T323DRAFT_scaffold00008.8_C,
whole genome shotgun sequence; 651937013; NZ_JHYI01000013.1
1787; Fischerella sp. PCC 9431 Fis9431DRAFT_Scaffold1.2, whole genome
shotgun sequence; 652326780; NZ_KE650771.1
1788; Fischerella sp. PCC 9605 FIS9605DRAFT_scaffold2.2, whole genome
shotgun sequence; 652337551; NZ_KI912149.1
1789; Clostridium akagii DSM 12554 BR66DRAFT_scaffold00010.10_C, whole
genome shotgun sequence; 652488076; NZ_JMLK01000014.1
1790; Glomeribacter sp. 1016415 H174DRAFT scaffold00001.1, whole genome
shotgun sequence; 652527059; NZ_KE384226.1
1791; Mesorhizobium sp. URHA0056 H959DRAFT_scaffold00004.4_C, whole
genome shotgun sequence; 652670206; NZ_AUEL01000005.1
1792; Mesorhizobium sp. URHA0056 H959DRAFT_scaffold00004.4_C, whole
genome shotgun sequence; 652670206; NZ_AUEL01000005.1
1793; Mesorhizobium loti R88b Meslo2DRAFT_Scaffold1.1, whole genome
shotgun sequence; 652688269; NZ_KI912159.1
1794; Mesorhizobium loti R88b Meslo2DRAFT_Scaffold1.1, whole genome
shotgun sequence; 652688269; NZ_KI912159.1
1795; Mesorhizobium ciceri W5M4083 MESCI2DRAFT_scaffold_01, whole
genome shotgun sequence; 652698054; NZ_K1912610.1
1796; Mesorhizobium sp. URHC0008 N549DRAFT_scaffold00001.1_C, whole
genome shotgun sequence; 652699616; NZ_JIAP01000001.1
1797; Mesorhizobium huakuii 7653R genome; 657121522; CP006581.1
1798; Mesorhizobium erdmanii USDA 3471 A3AUDRAFT_scaffold_7.8_C,
whole genome shotgun sequence; 652719874; NZ_AXAE01000013.1
1799; Mesorhizobium erdmanii USDA 3471 A3AUDRAFT_scaffold_7.8S,
whole genome shotgun sequence; 652719874; NZ_AXAE01000013.1
1800; Mesorhizobium loti CJ3sym A3A9DRAFT_scaffold_25.26_C, whole
genome shotgun sequence; 652734503; NZ_AXAL01000027.1
1801; Cobnella thennotolerans DSM 17683 G485DRAFT_scaffold00003.3,
whole genome shotgun sequence; 652794305; NZ_KE386956.1
1802; Mesorhizobium sp. WSM3626 Mesw3626DRAFT_scaffold_6.7_C, whole
genome shotgun sequence; 652879634; NZ_AZUY01000007.1
1803; Mesorhizobium sp. W5M1293 MesloDRAFT_scaffold_4.5, whole genome
shotgun sequence; 652910347; NZ_KI911320.1
1804; Legionella pneumophila subsp. pneumophila strain ATCC 33155
contig032, whole genome shotgun sequence; 652971687; NZ_JFIN01000032.1
1805; Legionella pneumophila subsp. pneumophila strain ATCC 33154 Scaffold2,
whole genome shotgun sequence; 653016013; NZ_KK074241.1
1806; Legionella pneumophila subsp. pneumophila strain ATCC 33823 Scaffold7,
whole genome shotgun sequence; 653016661; NZ_KK074199.1
1807; Bacillus sp. URHB0009 H980DRAFT_scaffold00016.16_C, whole
genome shotgun sequence; 653070042; NZ_AUER01000022.1
1808; Lachnospira multipara MC2003 T520DRAFT_scaffold00007.7_C, whole
genome shotgun sequence; 653225243; NZ_RIWY01000011.1
1809; Rhodanobacter sp. OR87 RhoOR87DRAFT_scaffold_24.25S, whole
genome shotgun sequence; 653308965; NZ_AXBJ01000026.1
1810; Rhodanobacter sp. OR92 RhoOR92DRAFT scaffold_6.7_C, whole
genome shotgun sequence; 653321547; NZ_ATYFO1000013.1
1811; Rhodanobacter sp. OR444 RHOOR444DRAFT
NODE_5_len_27336_cov_289_843719.5_C, whole
genome shotgun sequence; 653325317; NZ_ATYD01000005.1
1812; Rhodanobacter sp. OR444 RHOOR444DRAFT
NODE_39_len_52063_cov_320_872864.39, whole
genome shotgun sequence; 653330442; NZ_KE386531.1
1813; Bradyrhizobium sp. Aila-2 K288DRAFT_scaffold00086.86_C, whole
genome shotgun sequence; 653556699; NZ_AUEZ01000087.1
1814; Streptomyces sp. CNH099 B121DRAFT_scaffold_16.17_C, whole
genome shotgun sequence; 654239557; NZ_AZWL01000018.1
1815; Mastigocoleus testarum BC008 Contig-2, whole genome shotgun sequence;
959926096, NZ_LMTZ01000085.1
1816; [Eubacterium] cellulosolvens LD2006 T358DRAFT_scaffold00002.2_C,
whole genome shotgun sequence; 654392970; NZ_JHXY01000005.1
1817; Caulobacter sp. URHA0033 H963DRAFT_scaffold00023.23_C, whole
genome shotgun sequence; 654573246; NZ_AUE001000025.1
1818; Legionella pneumophila subsp. fraseri strain ATCC 35251 contig031, whole
genome shotgun sequence; 654928151; NZ_JFIG01000031.1
1819; Bacillus sp. FJAT-14578 Scaffold2, whole genome shotgun sequence;
654948246; NZ_K1632505.1
1820; Bacillus sp. 278922_107 H622DRAFT_scaffold00001.1, whole genome
shotgun sequence; 654964612; NZ_KI911354.1
1821; Streptomyces sp. SolWspMP-sol2th B083DRAFT_scaffold_17.18_C,
whole genome shotgun sequence; 654969845; NZ_ARPF01000020.1
1822; Ruminococcus flavefaciens ATCC 19208 L870DRAFT_scaffold00001.1,
whole genome shotgun sequence; 655069822; NZ_KI912489.1
1823; Paenibacillus sp. UNCCL52 BRO1DRAFT_scaffold00001.1, whole
genome shotgun sequence; 655095448; NZ_KK366023.1
1824; Paenibacillus taiwanensis DSM 18679 H509DRAFT_scaffold00010.10_C,
whole genome shotgun sequence; 655095554; NZ_AULE01000001.1
1825; Paenibacillus sp. UNC451MF BP97DRAFT_scaffold00018.18_C, whole
genome shotgun sequence; 655103160; NZ_JMLS01000021.1
1826; Desulfobulbus japonicus DSM 18378 G493DRAFT_scaffold00011.11_C,
whole genome shotgun sequence; 655133038; NZ_AUCV01000014.1
1827; Novosphingobium sp. B-7 scaffold147, whole genome shotgun sequence;
514419386; NZ_KE148338.1
1828; Streptomyces flavidovirens DSM 40150 G412DRAFT_scaffold00009.9,
whole genome shotgun sequence; 655416831; NZ_KE386846.1
1829; Terasakiella pusilla DSM 6293 Q397DRAFT_scaffold00039.39_C, whole
genome shotgun sequence; 655499373; NZ_JHY001000039.1
1830; Pseudoxanthomonas suwonensis J43 Psesu2DRAFT_scaffold_44.45S,
whole genome shotgun sequence; 655566937; NZ_JAES01000046.1
1831; Salinatimonas rosea DSM 21201 G407DRAFT_scaffold00021.21_C,
whole genome shotgun sequence; 655990125; NZ_AUBC01000024.1
1832; Paenibacillus harenae DSM 16969 H581DRAFT_scaffold00004.4, whole
genome shotgun sequence; 656245934; NZ_KE383845.1
1833; Paenibacillus alginolyticus DSM 5050 = NBRC 15375 strain DSM 5050
G519DRAFT_scaffold00043.43_C, whole genome shotgun sequence;
656249802; NZ_AUGY01000047.1
1834; Bacillus sp. RP1137 contig_18, whole genome shotgun sequence;
657210762; NZ_AXZS01000018.1
1835; Streptomyces leeuwenhoekii strain C34(2013) c34_sequence_0501, whole
genome shotgun sequence; 657301257; NZ_AZSD01000480.1
1836; Brevundimonas bacteroides DSM 4726 Q333DRAFT_scaffold00004.4_C,
whole genome shotgun sequence; 657605746; NZ_JNIX01000010.1
1837; Bacillus thuringiensis LM1212 scaffold 08, whole genome shotgun
sequence; 657629081; NZ_AYPV01000024.1
1838; Lachnoclosltidium phytofermentans KNHs212
BO10DRAFT_scf7180000000004_quiver.1_C, whole genome shotgun sequence;
657706549; NZ_JNLM01000001.1
1839; Paenibacillus polymyxa strain NRRL B-30509 contig00003, whole genome
shotgun sequence; 766607514; NZ_JTH001000003.1
1840; Paenibacillus polymyxa strain WLY78 S6_contig00095, whole genome
shotgun sequence; 657719467; NZ_ALJV01000094.1
1841; Stenotrophomonas maltophilia RR-10 STMALcontig40, whole genome
shotgun sequence; 484978121; NZ_AGRB01000040.1
1842; [Scytonema hofmanni] UTEX 2349 To19009DRAFT TPD.8, whole
genome shotgun sequence; 657935980; NZ_KK073768.1
1843; Caulobacter sp. UNC358MFTsu5.1 BR39DRAFT_scaffold00002.2_C,
whole genome shotgun sequence; 659864921; NZ_JONW01000006.1
1844; Sphingomonas sp. UNC305MFCo15.2 BR78DRAFT scaffold00001.1_C,
whole genome shotgun sequence; 659889283; NZ_JOOE01000001.1
1845; Streptomyces monomycini strain NRRL B-24309 P063_Doro1_scaffold135,
whole genome shotgun sequence; 662059070; NZ_KL571162.1
1846; Streptomyces peruviensis strain NRRL ISP-5592 P18 l_Doro l_scaffold152,
whole genome shotgun sequence; 662097244; NZ_KL575165.1
1847; Streptomyces natalensis strain NRRL B-5314 P055_Doro1_scaffold13,
whole genome shotgun sequence; 662108422; NZ_KL570019.1
1848; Streptomyces natalensis ATCC 27448 Scaffold_33, whole genome shotgun
sequence; 764439507; NZ_JRKI01000027.1
1849; Streptomyces baamensis strain NRRL B-2842 P144_Doro1_scaffold6,
whole genome shotgun sequence; 662129456; NZ_KL573544.1
1850; Streptomyces decoyicus strain NRRL ISP-5087 P056_Doro1_scaffold78,
whole genome shotgun sequence; 662133033; NZ_KL570321.1
1851; Streptomyces baamensis strain NRRL B-2842 P144_Doro1_scaffold26,
whole genome shotgun sequence; 662135579; NZ_KL573564.1
1852; Streptomyces puniceus strain NRRL ISP-5083 contig3.1, whole genome
shotgun sequence; 663149970; NZ_JOBQ01000003.1
1853; Spirillospora albida strain NRRL B-3350 contig1.1, whole genome shotgun
sequence; 663122276; NZ_JOFJ01000001.1
1854; Streptomyces sp. NRRL S-481 P269_Doro1_scaffold20, whole genome
shotgun sequence; 664428976; NZ_KL585179.1
1855; Streptomyces sp. NRRL S-87 contig69.1, whole genome shotgun sequence;
663169513; NZ_JO
1856; Streptomyces katrae strain NRRL B-16271 contig33.1, whole genome
shotgun sequence; 663300513; NZ_JNZY01000033.1
1857; Streptomyces katrae strain NRRL B-16271 contig37.1, whole genome
shotgun sequence; 663300941; NZ_JNZY01000037.1
1858; Streptomyces sp. NRRL B-3229 contig5.1, whole genome shotgun
sequence; 663316931; NZ_JOGP01000005.1
1859; Streptomyces griseus subsp. griseus strain NRRL F-2227 contig41.1, whole
genome shotgun sequence; 664325626; NZ_JOIT01000041.1
1860; Streptomyces roseoverticillatus strain NRRL B-3500 contig22.1, whole
genome shotgun sequence; 663372343; NZ_JOFL01000022.1
1861; Streptomyces roseoverticillatus strain NRRL B-3500 contig43.1, whole
genome shotgun sequence; 663373497; NZ_JOFL01000043.1
1862; Streptomyces rimosus subsp. rimosus strain NRRL WC-3924 contig19.1,
whole genome shotgun sequence; 663376433; NZ_JOBW01000019.1
1863; Streptomyces rimosus subsp. rimosus strain NRRL WC-3924 contig82.1,
whole genome shotgun sequence; 663379797; NZ_JOBW01000082.1
1864; Streptomyces sp. NRRL F-5917 contig68.1, whole genome shotgun
sequence; 663414324; NZ_JOHQ01000068.1
1865; Streptomyces sp. NRRL S-1448 contig134.1, whole genome shotgun
sequence; 663421576; NZ_JOGE01000134.1
1866; Allokutzneria albata strain NRRL B-24461 contig22.1, whole genome
shotgun sequence; 663596322; NZ_JOEF01000022.1
1867; Sphingobium sp. DC-2 ODE 45, whole genome shotgun sequence;
663818579; NZ_JNAC01000042.1
1868; Streptomyces aureocirculatus strain NRRL ISP-5386 contig11.1, whole
genome shotgun sequence; 664013282; NZ_JOAP01000011.1
1869; Streptomyces cyaneofuscatus strain NRRL B-2570 contig9.1, whole
genome shotgun sequence; 664021017; NZ_JOEM01000009.1
1870; Streptomyces aureocirculatus strain NRRL ISP-5386 contig49.1, whole
genome shotgun sequence; 664026629; NZ_JOAP01000049.1
1871; Streptomyces sclerotialus strain NRRL B-2317 contig7.1, whole genome
shotgun sequence; 664034500; NZ_JODX01000007.1
1872; Streptomyces anulatus strain NRRL B-2873 contig21.1, whole genome
shotgun sequence; 664049400; NZ_JOEZ01000021.1
1873; Streptomyces globisporus subsp. globisporus strain NRRL B-2709
contig24.1, whole genome shotgun sequence; 664051798; NZ_JNZK01000024.1
1874; Streptomyces rimosus subsp. rimosus strain NRRL B-2660 contig14.1,
whole genome shotgun sequence; 664052786; NZ_JOES01000014.1
1875; Streptomyces rimosus subsp. rimosus strain NRRL B-2660 contig59.1,
whole genome shotgun sequence; 664061406; NZ_JOES01000059.1
1876; Streptomyces achromogenes subsp. achromogenes strain NRRL B-2120
contig2.1, whole genome shotgun sequence; 664063830; NZ_JODT01000002.1
1877; Streptomyces rimosus subsp. rimosus strain NRRL B-2660 contig124.1,
whole genome shotgun sequence; 664066234; NZ_JOES01000124.1
1878; Streptomyces albus subsp. albus strain NRRL B-2445 contig28.1, whole
genome shotgun sequence; 664095100; NZ_JOED01000028.1
1879; Streptomyces rimosus subsp. rimosus strain NRRL WC-3929 contig5.1,
whole genome shotgun sequence; 664104387; NZ_JOJJ01000005.1
1880; Streptomyces rimosus subsp. rimosus strain NRRL WC-3904 contig10.1,
whole genome shotgun sequence; 664126885; NZ_JOCQ01000010.1
1881; Streptomyces rimosus subsp. rimosus strain NRRL WC-3904 contig106.1,
whole genome shotgun sequence; 664141810; NZ_JOCQ01000106.1
1882; Streptomyces griseus subsp. griseus strain NRRL F-5144 contig19.1, whole
genome shotgun sequence; 664184565; NZ_JOGA01000019.1
1883; Streptomyces sp. NRRL F-2295 P395contig79.1, whole genome shotgun
sequence; 926288193; NZ_LGCY01000146.1
1884; Streptomyces xiamenensis strain 318, complete genome; 921170702;
NZ_CP009922.2
1885; Streptomyces griseus subsp. griseus strain NRRL F-5618 contig4.1, whole
genome shotgun sequence; 664233412; NZ_JOGN01000004.1
1886; Streptomyces lavenduligriseus strain NRRL ISP-5487 contig2.1, whole
genome shotgun sequence; 664244706; NZ_JOBD01000002.1
1887; Streptomyces lavenduligriseus strain NRRL ISP-5487 contig2.1, whole
genome shotgun sequence; 664244706; NZ_JOBD01000002.1
1888; Streptomyces sp. NRRL S-920 contig3.1, whole genome shotgun sequence;
664245663; NZ_JODF01000003.1
1889; Streptomyces sp. NRRL S-337 contig41.1, whole genome shotgun
sequence; 664277815; NZ_JOIX01000041.1
1890; Streptomyces griseus strain S4-7 contig113, whole genome shotgun
sequence; 764464761; NZ_JYBE01000113.1
1891; Streptomyces sp. NRRL F-4474 contig32.1, whole genome shotgun
sequence; 664323078; NZ_JOIB01000032.1
1892; Streptomyces sp. NRRL S-475 contig32.1, whole genome shotgun
sequence; 664325162; NZ_JOJB01000032.1
1893; Streptomyces sp. NRRL S-646 contig23.1, whole genome shotgun
sequence; 664421883; NZ_JODC01000023.1
1894; Streptomyces sp. NRRL S-1813 contig13.1, whole genome shotgun
sequence; 664466568; NZ_JOHB01000013.1
1895; Streptomyces sp. NRRL WC-3773 contig2.1, whole genome shotgun
sequence; 664478668; NZ_JOJI01000002.1
1896; Streptomyces sp. NRRL WC-3773 contig36.1, whole genome shotgun
sequence; 664487325; NZ_JOJI01000036.1
1897; Streptomyces olivaceus strain NRRL B-3009 contig20.1, whole genome
shotgun sequence; 664523889; NZ_JOFH01000020.1
1898; Streptomyces ochraceiscleroticus strain NRRL ISP-5594 contig9.1, whole
genome shotgun sequence; 664540649; NZ_JOAX01000009.1
1899; Streptomyces sp. NRRL S-118 P205 Doro1_scaffold2, whole genome
shotgun sequence; 664556736; NZ_KL591003.1
1900; Streptomyces sp. NRRL S-118 P205_Doro1_scaffold34, whole genome
shotgun sequence; 664565137; NZ_KL591029.1
1901; Streptomyces olindensis strain DAUFPE 5622 103, whole genome shotgun
sequence; 739918964; NZ_JJOH01000097.1
1902; Streptomyces sp. NRRL S-623 contig14.1, whole genome shotgun
sequence; 665522165; NZ_JOJC01000016.1
1903; Streptomyces durhamensis strain NRRL B-3309 contig3.1, whole genome
shotgun sequence; 665586974; NZ_JNXR01000003.1
1904; Streptomyces durhamensis strain NRRL B-3309 contig23.1, whole genome
shotgun sequence; 665604093; NZ_JNXR01000023.1
1905; Streptomyces roseochromogenus subsp. oscitans DS 12.976 chromosome,
whole genome shotgun sequence; 566155502; NZ_CM002285.1
1906; Leptolyngbya sp. Heron Island J 50, whole genome shotgun sequence;
553739852; NZ_AWNH01000066.1
1907; Leptolyngbya sp. Heron Island J 50, whole genome shotgun sequence;
553739852; NZ_AWNH01000066.1
1908; Sphingobium lactosutens DS20 contig107, whole genome shotgun
sequence; 544811486; NZ_ATDP01000107.1
1909; Streptomyces sp. NRRL F-5123 contig24.1, whole genome shotgun
sequence; 671535174; NZ_JOHY01000024.1
1910; Bacillus sp. MB2021 T349DRAFT_scaffold00010.10_C, whole genome
shotgun sequence; 671553628; NZ_JN1101000011.1
1911; Lachnospira multipara LB2003 T537DRAFT_scaffold00010.10_C, whole
genome shotgun sequence; 671578517; NZ_JNKW01000011.1
1912; Closltidium drakei strain SL1 contig_20, whole genome shotgun sequence;
692121046; NZ_JIBU02000020.1
1913; Candidatus Paracaedibacter symbiosus strain PRA9 Scaffold_1, whole
genome shotgun sequence; 692233141; NZ_JQAK01000001.1
1914; Stenotrophomonas maltophilia strain 53 contig_2, whole genome shotgun
sequence; 692316574; NZ_JRJA01000002.1
1915; Klebsiella variicola genome assembly Kv4880, contig BN1200_Contig_75,
whole genome shotgun sequence; 906292938; CXPB01000073.1
1916; Streptomyces alboviridis strain NRRL B-1579 contig18.1, whole genome
shotgun sequence; 695845602; NZ_JNWU01000018.1
1917; Streptomyces sp. CN5654 CD02DRAFT_scaffold00023.23S, whole
genome shotgun sequence; 695856316; NZ_JNLT01000024.1
1918; Streptomyces albus subsp. albus strain NRRL B-16041 contig26.1, whole
genome shotgun sequence; 695869320; NZ_JNWW01000026.1
1919; Streptomyces sp. JS01 contig2, whole genome shotgun sequence;
695871554; NZ_JPWW01000002.1
1920; Mesorhizobium ciceri CMG6 MescicDRAFT_scaffold_1.2_C, whole
genome shotgun sequence; 639162053; NZ_AWZS01000002.1
1921; Mesorhizobium japonicum R7A MesloDRAFT_Scaffold1.1, whole
genome shotgun sequence; 696358903; NZ_KI632510.1
1922; Stenotrophomonas maltophilia RA8, whole genome shotgun sequence;
493412056; NZ_CALM01000701.1
1923; Streptomyces griseus subsp. griseus strain NRRL B-2307 contig15.1, whole
genome shotgun sequence; 702684649; NZ_iNZI01000015.1
1924; Kitasatospora setae KM-6054 DNA, complete genome; 357386972;
NC_016109.1
1925; Streptomyces lydicus strain NRRL ISP-5461 contig41.1, whole genome
shotgun sequence; 702808005; NZ_JNZA01000041.1
1926; Streptomyces iakyrus strain NRRL ISP-5482 contig6.1, whole genome
shotgun sequence; 702914619; NZ_JNXI01000006.1
1927; Kibdelosporangium afidum subsp. largum strain NRRL B-24462
contig91.4, whole genome shotgun sequence; 703243970; NZ_JNYM01001429.1
1928; Streptomyces galbus strain KCCM 41354 contig00021, whole genome
shotgun sequence; 716912366; NZ_JRHJ01000016.1
1929; Bacillus aryabhattai strain GZ03 contig1_scaffoldl, whole genome shotgun
sequence; 723602665; NZ_JPIE01000001.1
1930; Bacillus mycoides FSL H7-687 Contig052, whole genome shotgun
sequence; 727271768; NZ_ASPY01000052.1
1931; Bacillus weihenstephanensis strain JAS 83/3 Bw_JAS-83/3_contig00005,
whole genome shotgun sequence; 910095435; NZ_JNLY01000005.1
1932; Sphingomonas sp. ERGS Contig80, whole genome shotgun sequence;
734983422; NZ_JSXI01000079.1
1933; Lachnospira multipara ATCC 19207 G600DRAFT_scaffold00009.9_C,
whole genome shotgun sequence; 653218978; NZ_AUJG01000009.1
1934; Bacillus sp. 72 T409DRAFT_scf7180000000077_quiver.15S, whole
genome shotgun sequence; 736160933; NZ_JQMI01000015.1
1935; Bacillus simplex BA2H3 scaffold2, whole genome shotgun sequence;
736214556; NZ_KN360955.1
1936; Dehalobacter sp. UNSWDHB Contig_139, whole genome shotgun
sequence; 544905305; NZ_AUUR01000139.1
1937; Actinomadura oligospora ATCC 43269 P696DRAFT_scaffold00008.8_C,
whole genome shotgun sequence; 651281457; NZ_JADG01000010.1
1938; Hyphomonas oceanitis 5CH89 contig59, whole genome shotgun sequence;
737569369; NZ_ARYL01000059.1
1939; Bacillus vietnamensis strain HD-02, whole genome shotgun sequence;
736762362; NZ_CCDN010000009.1
1940; Hyphomonas sp. CY54-11-8 contig4, whole genome shotgun sequence;
736764136; NZ_AWFD01000033.1
1941; Erythrobacter longus strain DSM 6997 contig9, whole genome shotgun
sequence; 736965849; NZ_JMIW01000009.1
1942; Caulobacter henricii strain CF287 EW90DRAFT_scaffold00023.23_C,
whole genome shotgun sequence; 737089868; NZ_JQJNO1000025.1
1943; Caulobacter henricii strain YR570 EX13DRAFT_scaffold00022.22_C,
whole genome shotgun sequence; 737103862; NZ_JQJP01000023.1
1944; Calothfix sp. 336/3, complete genome; 821032128; NZ_CP011382.1
1945; Bacillus firmus DS1 scaffold33, whole genome shotgun sequence;
737350949; NZ_APVL01000034.1
1946; Bacillus hemicellulosilyticus JCM 9152, whole genome shotgun sequence;
737360192; NZ_BAUU01000008.1
1947; Edaphobacter aggregans DSM 19364 Q363DRAFT_scaffold00032.32_C,
whole genome shotgun sequence; 737370143; NZ_JQKI01000040.1
1948; Bacillus sp. UNC322MFChir4.1 BR72DRAFT_scaffold00004.4, whole
genome shotgun sequence; 737456981; NZ_KN050811.1
1949; Hyphomonas oceanitis SCH89 contig20, whole genome shotgun sequence;
737567115; NZ_ARYL01000020.1
1950; Hyphomonas oceanitis SCH89 contig59, whole genome shotgun sequence;
737569369; NZ_ARYL01000059.1
1951; Halobacillus sp. BBL2006 cont444, whole genome shotgun sequence;
737576092; NZ_JRNX01000441.1
1952; Hyphomonas atlantica strain 22II1-22F38 contig10, whole genome shotgun
sequence; 737577234; NZ_AWFH01000002.1
1953; Hyphomonas atlantica strain 22II1-22F38 contig28, whole genome shotgun
sequence; 737580759; NZ_AWFH01000021.1
1954; Hyphomonas jannaschiana VP2 contig2, whole genome shotgun sequence;
737608363; NZ_ARYJ01000002.1
1955; Bacillus akibai JCM 9157, whole genome shotgun sequence; 737696658;
NZ_BAUV01000025.1
1956; Frankia sp. CeD CEDDRAFT_scaffold_22.23, whole genome shotgun
sequence; 737947180; NZ_JPGU01000023.1
1957; Clostridium butyricum strain NEC8, whole genome shotgun sequence;
960334134; NZ_CBYK010000003.1
1958; Clostridium butyricum AGR2140 G607DRAFT_scaffold00008.8_C,
whole genome shotgun sequence; 653632769; NZ_AUJN01000009.1
1959; Fusobacterium necrophorum BFTR-2 contig0075, whole genome shotgun
sequence; 737951550; NZ_JAAG01000075.1
1960; [Leptolyngbya] sp. JSC-1 Osccy1DRAFT_CYJSC_l_DRAF_scaffold00069.1,
whole genome shotgun sequence; 738050739; NZ_KL662191.1
1961; Bradyrhizobium sp. WSM1743 YU9DRAFT_scaffold_1.2_C, whole
genome shotgun sequence; 653526890; NZ_AXAZ01000002.1
1962; Mesorhizobium sp. WSM3224 YU3DRAFT_scaffold_3.4_C, whole
genome shotgun sequence; 652912253; NZ_ATY001000004.1
1963; Myxosarcina sp. GI1 contig_5, whole genome shotgun sequence;
738529722; NZ_JRFE01000006.1
1964; Novosphingobium resinovorum strain KF1 contig000002, whole genome
shotgun sequence; 738613868; NZ_JFYZ01000002.1
1965; Paenibacillus sp. FSL H7-689 Contig015, whole genome shotgun sequence;
738716739; NZ_ASPU01000015.1
1966; Paenibacillus wynnii strain DSM 18334 unitig_2, whole genome shotgun
sequence; 738760618; NZ_JQCR01000002.1
1967; Paenibacillus sp. FSL R7-269 Contig022, whole genome shotgun sequence;
738803633; NZ_ASPS01000022.1
1968; Paenibacillus pinihumi DSM 23905 = JCM 16419 strain DSM 23905
H583DRAFT_scaffold00005.5, whole genome shotgun sequence; 655115689;
NZ_KE383867.1
1969; Paenibacillus harenae DSM 16969 H58 1DRAFT_scaffold00002.2, whole
genome shotgun sequence; 655165706; NZ_KE383843.1
1970; Paenibacillus sp. FSL R7-277 Contig088, whole genome shotgun sequence;
738841140; NZ_ASPX01000088.1
1971; Pseudonocardia acaciae DSM 45401 N912DRAFT_scaffold00002.2_C,
whole genome shotgun sequence; 655569633; NZ_JIAI01000002.1
1972; Amycolatopsis orientalis DSM 40040 = KCTC 9412 contig_32, whole
genome shotgun sequence; 499136900; NZ_ASJB01000015.1
1973; Sphingobium chlorophenolicum strain NBRC 16172 contig000025, whole
genome shotgun sequence; 739594477; NZ_JFHR01000025.1
1974; Sphingobium herbicidovorans NBRC 16415 contig000028, whole genome
shotgun sequence; 739610197; NZ_JFZA02000028.1
1975; Sphingobium sp. bal seq0028, whole genome shotgun sequence;
739622900; NZ_JPPQ01000069.1
1976; Sphingomonas paucimobilis strain EPA505 contig000016, whole genome
shotgun sequence; 739629085; NZ_JFYY01000016.1
1977; Sphingomonas paucimobilis strain EPA505 contig000027, whole genome
shotgun sequence; 739630357; NZ_JFYY01000027.1
1978; Sphingobium yanoikuyae ATCC 51230 supercont1.1, whole genome
shotgun sequence; 427407324; NZ_JH992904.1
1979; Sphingobium yanoikuyae strain B1 scaffold28, whole genome shotgun
sequence; 739656825; NZ_KL662220.1
1980; Sphingobium yanoikuyae strain B1 contig000002, whole genome shotgun
sequence; 739661773; NZ_JGVR01000002.1
1981; Sphingomonas wittichii strain YR128 EX04DRAFT_scaffold00050.50_C,
whole genome shotgun sequence; 739674258; NZ_JQMC01000050.1
1982; Sphingomonas sp. SKA58 scf_1100007010440, whole genome shotgun
sequence; 211594417; NZ_CH959308.1
1983; Sphingopyxis sp. LC363 contig1, whole genome shotgun sequence;
739699072; NZ_JNFC01000001.1
1984; Sphingopyxis sp. LC363 contig30, whole genome shotgun sequence;
739701660; NZ_JNFC01000024.1
1985; Sphingopyxis sp. LC363 contig5, whole genome shotgun sequence;
739702995; NZ_JNFC01000045.1
1986; Streptococcus salivarius strain NU10 contig_11, whole genome shotgun
sequence; 739748927; NZ_BMT01000011.1
1987; Streptomyces griseoluteus strain NRRL ISP-5360 contig43.1, whole
genome shotgun sequence; 663180071; NZ_JOBE01000043.1
1988; Streptomyces griseorubens strain JSD-1 contig143, whole genome shotgun
sequence; 657284919; BMG01000143.1
1989; Streptomyces avermitilis MA-4680 = NBRC 14893, complete genome;
162960844; NC_003155.4
1990; Streptomyces achromogenes subsp. achromogenes strain NRRL B-2120
contig2.1, whole genome shotgun sequence; 664063830; NZ_JODT01000002.1
1991; Streptomyces griseus subsp. griseus strain NRRL WC-3645 contig40.1,
whole genome shotgun sequence; 739830264; NZ_JOJE01000040.1
1992; Streptomyces scabiei strain NCPPB 4086 scf 65433_365.1, whole genome
shotgun sequence; 739854483; NZ_KL997447.1
1993; Streptomyces sp. FXJ7.023 Contig10, whole genome shotgun sequence;
510871397; NZ_APIV01000010.1
1994; Streptomyces sp. PRh5 contig001, whole genome shotgun sequence;
740097110; NZ_JABQ01000001.1
1995; Paenibacillus sp. FSL H7-0357, complete genome; 749299172;
NZ_CP009241.1
1996; Paenibacillus stellifer strain DSM 14472, complete genome; 753871514;
NZ_CP009286.1
1997; Burkholderia pseudomallei strain MSHR4018 scaffold2, whole genome
shotgun sequence; 740942724; NZ_KN323080.1
1998; Burkholderia sp. ABCPW 111 X946.contig-100_0, whole genome shotgun
sequence; 740958729; NZ_JPWT01000001.1
1999; Cupriavidus sp. IDO NODE 7, whole genome shotgun sequence;
742878908; NZ_JWMA01000006.1
2000; Paenibacillus polymyxa strain DSM 365 Contig001, whole genome shotgun
sequence; 746220937; NZ_JMIQ01000001.1
2001; Paenibacillus polymyxa strain CF05 genome; 746228615; NZ_CP009909.1
2002; Novosphingobium malaysiense strain MUSC 273 Contig9, whole genome
shotgun sequence; 746241774; NZ_JIDI01000009.1
2003; Paenibacillus sp. IL-IB B 3415 contig_069, whole genome shotgun sequence;
746258261; NZ_JUB01000069.1
2004; Novosphingobium subtenaneum strain DSM 12447 NJ75_contig000013,
whole genome shotgun sequence; 746288194; NZ_JRVC01000013.1
2005; Pandoraea sputorum strain DSM 21091, complete genome; 749204399;
NZ_CP010431.1
2006; Xanthomonas cannabis pv. cannabis strain NCPPB 3753 contig_67, whole
genome shotgun sequence; 746366822; NZ_JSZF01000067.1
2007; Xanthomonas arboricola pv. pruni MAFF 301420 strain MAFF301420,
whole genome shotgun sequence; 759376814; NZ_BAVC01000017.1
2008; Xanthomonas arboricola pv. celebensis strain NCPPB 1630
scf_49108_10.1, whole genome shotgun sequence; 746486416; NZ_KL638873.1
2009; Xanthomonas arboricola pv. celebensis strain NCPPB 1832
scf_23466_141.1, whole genome shotgun sequence; 746494072;
NZ_KL638866.1
2010; Xanthomonas cannabis pv. cannabis strain NCPPB 2877 contig_94, whole
genome shotgun sequence; 746532813; NZ_JSZE01000094.1
2011; Sphingopyxis fiibergensis strain Kp5.2, complete genome; 749188513;
NZ_CP009122.1
2012; Sphingopyxis fiibergensis strain Kp5.2, complete genome; 749188513;
NZ_CP009122.1
2013; Streptomyces sp. 769, complete genome; 749181963; NZ_CP003987.1
2014; Hassallia byssoidea VB512170 scaffold_0, whole genome shotgun
sequence; 748181452; NZ_JTCM01000043.1
2015; Jeotgalibacillus malaysiensis strain D5 chromosome, complete genome;
749182744; NZ_CP009416.1
2016; Paenibacillus sp. FSL R7-0273, complete genome; 749302091;
NZ_CP009283.1
2017; Paenibacillus polymyxa strain Sb3-1, complete genome; 749204146;
NZ_CP010268.1
2018; Klebsiella pneumoniae CCHB01000016, whole genome shotgun sequence;
749639368; NZ_CCHB01000016.1
2019; Streptomyces albus strain DSM 41398, complete genome; 749658562;
NZ_CP010519.1
2020; Streptomonospora alba strain YIM 90003 contig_9, whole genome shotgun
sequence; 749673329; NZ_JR0001000009.1
2021; Uncultured marine bacterium 463 clone EBAC080-L32B05 genomic
sequence; 41582259; AY458641.2
2022; Nocardiopsis chromatogenes YIM 90109 contig_59, whole genome
shotgun sequence; 484026076; NZ_ANBH01000059.1
2023; Paenibacillus dendritiformis C454 PDENDC1000064, whole genome
shotgun sequence; 374605177; NZ_AHKH01000064.1
2024; Streptomyces auratus AGR0001 Scaffold1_85, whole genome shotgun
sequence; 396995461; AJGV01000085.1
2025; Tolypothrix campylonemoides VB511288 scaffold 0, whole genome
shotgun sequence; 751565075; NZ_JXCB01000004.1
2026; Jeotgalibacillus soli strain P9 c0ntig00009, whole genome shotgun
sequence; 751619763; NZ_JXRP01000009.1
2027; Cylindrospermum stagnale PCC 7417, complete genome; 434402184;
NC_019757.1
2028; Sphingopyxis alaskensis RB2256, complete genome; 103485498;
NC_008048.1
2029; Syntrophobotulus glycolicus DSM 8271, complete genome; 325288201;
NC_015172.1
2030; Novosphingobium aromaticivorans DSM 12444, complete genome;
87198026; NC_007794.1
2031; Novosphingobium sp. PP1Y Lpl large plasmid, complete replicon;
334133217; NC_015579.1
2032; Bacillus sp. 1NLA3E, complete genome; 488570484; NC_021171.1
2033; Burkholderia rhizoxinica HKI 454, complete genome; 312794749;
NC_014722.1
2034; Psychromonas ingrahamii 37, complete genome; 119943794; NC_008709.1
2035; Streptococcus salivarius JI1V18777 complete genome; 387783149;
NC_017595.1
2036; Actinosynnema mirum DSM 43827, complete genome; 256374160; whole
NC_013093.1
2037; Legionella pneumophila 2300/99 Alcoy, complete genome; 296105497;
NC_014125.1
2038; Paenibacillus sp. FSL R5-0912, complete genome; 754884871;
NZ_CP009282.1
2039; Streptomyces sp. NBRC 110027, whole genome shotgun sequence;
754788309; NZ_BBN001000002.1
2040; Streptomyces sp. NBRC 110027, whole genome shotgun sequence;
754796661; NZ_BBN001000008.1
2041; Paenibacillus sp. FSL R7-0331, complete genome; 754821094;
NZ_CP009284.1
2042; Kibdelosporangium sp. MJ126-NF4, whole genome shotgun sequence;
754819815; NZ_CDME01000002.1
2043; Paenibacillus camerounensis strain G4, whole genome shotgun sequence;
754841195; NZ_CCDG010000069.1
2044; Paenibacillus borealis strain DSM 13188, complete genome; 754859657;
NZ_CP009285.1
2045; Legionella pneumophila serogroup 1 strain TUM 13948, whole genome
shotgun sequence; 754875479; NZ_BAYQ01000013.1
2046; Streptacidiphilus neutrinimicus strain NBRC 100921, whole genome
shotgun sequence; 755016073; NZ_BBP001000030.1
2047, Streptacidiphilus melanogenes strain NBRC 103184, whole genome
shotgun sequence; 755032408; NZ_BBPP01000024.1
2048, Streptacidiphilus anmyonensis strain NBRC 103185, whole genome
shotgun sequence; 755077919; NZ_BBPQ01000048.1
2049, Streptacidiphilus jiangxiensis strain NBRC 100920, whole genome shotgun
sequence; 755108320; NZ_BBPN01000056.1
2050; Mesorhizobium sp. ORS3359, whole genome shotgun sequence;
756828038; NZ_CCNC01000143.1
2051; Bacillus megaterium WSH-002, complete genome; 384044176;
NC_017138.1
2052; Aneurinibacillus migulanus strain Nagano E1 contig_36, whole genome
shotgun sequence; 928874573; NZ_LIXL01000208.1
2053; Sphingobium sp. Ant17 Contig_90, whole genome shotgun sequence;
759431957; NZ_JEMV01000094.1
2054; Pseudomonas sp. HMP271 Pseudomonas HMP271_contig_7,
genome shotgun sequence; 759578528; NZ_JMFZ01000007.1
2055; Streptomyces luteus strain TRM 45540 Scaffoldl, whole genome shotgun
sequence; 759659849; NZ_KNO39946.1
2056; Streptomyces nodosus strain ATCC 14899 genome; 759739811;
NZ_CP009313.1
2057; Streptomyces fradiae strain ATCC 19609 contig0008, whole genome
shotgun sequence; 759752221; NZ_JNAD01000008.1
2058; Streptomyces bingchenggensis BCW-1, complete genome; 374982757;
NC_016582.1
2059; Streptomyces glaucescens strain GLA.O, complete genome; 759802587;
NZ_CP009438.1
2060; Novosphingobium sp. Rr 2-17 contig98, whole genome shotgun sequence;
393773868; NZ_AKFJ01000097.1
2061; Nonomumea candida strain NRRL B-24552 contig27.1, whole genome
shotgun sequence; 759944049; NZ_JOAG01000029.1
2062; Nonomumea candida strain NRRL B-24552 contig28.1, whole genome
shotgun sequence; 759944490; NZ_JOAG01000030.1
2063; Nonomumea candida strain NRRL B-24552 contig42.1, whole genome
shotgun sequence; 759948103; NZ_JOAG01000045.1
2064; Paenibacillus polymyxa E681, complete genome; 864439741; NC_014483.2
2065; Xanthomonas hortorum pv. carotae str. M081 chromosome, whole genome
shotgun sequence; 565808720; NZ_CM002307.1
2066; Novosphingobium sp. P6W scaffold3, whole genome shotgun sequence;
763092879; NZ_JXZE01000003.1
2067; Novosphingobium sp. P6W scaffold9, whole genome shotgun sequence;
763095630; NZ_JXZE01000009.1
2068; Sphingomonas hengshuiensis strain WHSC-8, complete genome;
764364074; NZ_CP010836.1
2069; Streptomyces ahygroscopicus subsp. wuyiensis strain CK-15 contig3, whole
lgenome shotgun sequence; 921220646;
2070; Streptomyces cyaneogriseus subsp. noncyanogenus strain NMWT 1,
complete genome; 764487836; NZ_CP010849.1
2071; Bacillus subtilis subsp. spizizenii RFWG1A4 contig00010, whole genome
shotgun sequence; 764657375; NZ_AJHM01000010.1
2072; Mastigocladus laminosus UU774 scaffold 22, whole genome shotgun
sequence; 764671177; NZ_JX1101000139.1
2073; Mooreaproducens 3L scf52052, whole genome shotgun sequence;
332710285; NZ_GL890953.1
2074; Streptomyces iranensis genome assembly Siranensis, scaffold SCAF00002;
765016627; NZ_LK022849.1
2075; Risungbinella massiliensis strain GD1, whole genome shotgun sequence;
765315585; NZ_LN812103.1
2076; Sphingobium sp. YBL2, complete genome; 765344939; NZ_CP010954.1
2077; Streptococcus suis strain LS5J, whole genome shotgun sequence;
765394696; NZ_CEEZ01000028.1
2078; Streptococcus suis strain LS8I, whole genome shotgun sequence;
766595491; NZ_CEHM01000004.1
2079; Thalassospira sp. HJ NODE 2, whole genome shotgun sequence;
766668420; NZ_JY1101000010.1
2080; Frankia sp. CpIl-P FF86_1013, whole genome shotgun sequence;
946950294; NZ_LEX01000013.1
2081; Streptococcus suis strain B28P, whole genome shotgun sequence;
769231516; NZ_CDTB01000010.1
2082; Streptomyces sp. NRRL F-4428 contig40.2, whole genome shotgun
sequence; 772774737; NZ_JYJI01000131.1
2083; Bacterium endosymbiont of Mortierella elongata FMR23-6, whole genome
shotgun sequence; 779889750; NZ_DF850521.1
2084; Streptomyces sp. FxanaA7 F611DRAFT_scaffold00041.41_C, whole
genome shotgun sequence; 780340655; NZ_LACL01000054.1
2085; Streptomyces rubellomurinus strain ATCC 31215 contig-63, whole genome
shotgun sequence; 783211546; NZ_JZKH01000064.1
2086; Streptomyces rubellomurinus subsp. indigoferus strain ATCC 31304 contig-55,
whole genome shotgun sequence; 783374270; NZ_JZKG01000056.1
2087; Bacillus sp. UMTAT18 contig000011, whole genome shotgun sequence;
NZ_PM02000059.1 806951735; NZ_JSFD01000011.1
2088; Paenibacillus wulumuqiensis strain Y24 Scaffold4, whole genome shotgun
sequence; 808051893; NZ_KQ040793.1
2089; Paenibacillus daici strain H9 Scaffold3, whole genome shotgun sequence;
808064534; NZ_KQ040798.1
2090; Paenibacillus algorifonticola strain XJ259 Scaffold20_1, whole genome
shotgun sequence; 808072221; NZ_LAQ001000025.1
2091; Xanthomonas campestris strain 17, complete genome; 810489403;
NZ_CP011256.1
2092; Bacillus sp. SA1-12 scf7180000003378, whole genome shotgun sequence;
817541164; NZ_LATZ01000026.1
2093; Spirosoma radiotolerans strain DG5A, complete genome; 817524426;
NZ_CP010429.1
2094; Streptomyces lydicus A02, complete genome; 822214995;
NZ_CP007699.1
2095; Streptomyces lydicus A02, complete genome; 822214995;
NZ_CP007699.1
2096; Bacillus cereus strain B4147 NODE_5, whole genome shotgun sequence;
822530609; NZ_LCYN01000004.1
2097; Xanthomonas pisi DSM 18956 Contig_28, whole genome shotgun
sequence; 822535978; NZ_JPLE01000028.1
2098; Erythrobacter luteus strain KA37 contig1, whole genome shotgun sequence;
822631216; NZ_LBHB01000001.1
2099; Xanthomonas arboricola strain CFBP 7634 Xarjug-CFBP7634-G11, whole
genome shotgun sequence; 825139250; NZ_JZEH01000001.1
2100; Xanthomonas arboricola strain CFBP 7651 Xarjug-CFBP7651-G11, whole
genome shotgun sequence; 825156557; NZ_JZEI01000001.1
2101; Luteimonas sp. FCS-9 scf7180000000225, whole genome shotgun
sequence; 825314716; NZ_LASZ01000002.1
2102; Streptomyces sp. KE1 Contig11, whole genome shotgun sequence;
825353621; NZ_LAYX01000011.1
2103; Streptomyces sp. M10 Scaffold2, whole genome shotgun sequence;
835355240; NZ_KN549147.1
2104; Xanthomonas cannabis pv. phaseoli strain Nyagatare scf 52938_7, whole
genome shotgun sequence; 835885587; NZ_KN265462.1
2105; Bacillus aryabhattai strain T61 Scaffold1, whole genome shotgun sequence;
836596561; NZ_KQ087173.1
2106; Paenibacillus sp. TCA20, whole genome shotgun sequence; 843088522;
NZ_BBIWO1000001.1
2107; Bacillus circulans strain RIT379 contig11, whole genome shotgun sequence;
844809159; NZ_LDPH01000011.1
2108; Omithinibacillus califomiensis strain DSM 16628 contig_22, whole genome
shotgun sequence; 849059098; NZ_LDUE01000022.1
2109; Bacillus pseudalcaliphilus strain DSM 8725 super11, whole genome
shotgun sequence; 849078078;
2110; Bacillus aryabhattai strain LK25 16, whole genome shotgun sequence;
850356871; NZ_LDWN01000016.1
2111; Methanobactenum arcticum strain M2 EI99DRAFT_scaffold00005.5_C,
whole genome shotgun sequence; 851140085; NZ_JQKN01000008.1
2112; Methanobacterium sp. SMA-27 DL91DRAFT_unitig_0_quiver.1_C, whole
genome shotgun sequence; 851351157; NZ_JQLY01000001.1
2113; Cellulomonas sp. A375-1 contig_129, whole genome shotgun sequence;
856992287; NZ_LFKW01000127.1
2114; Streptomyces sp. HNS054 contig28, whole genome shotgun sequence;
860547590; NZ_LDZX01000028.1
2115; Bacillus cereus strain RIMV BC 126 212, whole genome shotgun sequence;
872696015; NZ_LAB001000035.1
2116; Sphingomonas sp. MEA3-1 contig00021, whole genome shotgun sequence;
873296042; NZ_LECE01000021.1
2117; Sphingomonas sp. MEA3-1 contig00040, whole genome shotgun sequence;
873296160; NZ_LECE01000040.1
2118; Bacillus sp. 220_BSPC 1447_75439_1072255, whole genome shotgun
sequence; 880954155; NZ_JVPL01000109.1
2119; Bacillus sp. 522_BSPC 2470_72498_1083579_594_ . . . _522_, whole
genome shotgun sequence; 880997761; NZ_JVDT01000118.1
2120; Streptomyces ipomoeae 91-03 gcontig_1108499710267, whole genome
shotgun sequence; 429195484; NZ_AEJC01000118.1
2121; Scytonema tolypothlichoides VB-61278 scaffold 6, whole genome shotgun
sequence; 890002594; NZ_JXCA01000005.1
2122; Erythrobacter atlanticus strain s21-N3, complete genome; 890444402;
NZ_CP011310.1
2123; Sphingobium yanoikuyae strain SHJ scaffold12, whole genome shotgun
sequence; 893711343; NZ_KQ235994.1
2124; Sphingobium yanoikuyae strain SHJ scaffold33, whole genome shotgun
sequence; 893711364; NZ_KQ236015.1
2125; Sphingobium yanoikuyae strain SHJ scaffold47, whole genome shotgun
sequence; 893711378; NZ_KQ236029.1
2126; Stenotrophomonas maltophilia strain 544_SMAL
1161_223966_2976806_599_ . . . _882_, whole genome shotgun sequence;
896492362; NZ_JVCU01000107.1 NZ_LFJ001000006.1
2127; Stenotrophomonas maltophilia strain 131_SMAL
1126_236170_8501292_717_ . . . _1018_, whole genome shotgun sequence;
896520167; NZ_JVUI01000038.1
2128; Stenotrophomonas maltophilia strain 95l_SMAL 71_125859_2268311,
whole genome shotgun sequence; 896567682; NZ_JUMH01000022.1
2129; Stenotrophomonas maltophilia strain OC194 contig_98, whole genome
shotgun sequence; 930169273; NZ_LEH01000098.1
2130; Streptococcus pseudopneumoniae strain 445_SPSE
347_91401_2272315_31_ . . . _319_, whole genome shotgun sequence;
896667361; NZ_JVGV01000030.1
2131; Streptomyces caatingaensis strain CMAA 1322 contig02, whole genome
shotgun sequence; 906344334; NZ_LFXA01000002.1
2132; Streptomyces caatingaensis strain CMAA 1322 contig02, whole genome
shotgun sequence; 906344334; NZ_LFXA01000002.1
2133; Streptomyces caatingaensis strain CMAA 1322 contig07, whole genome
shotgun sequence; 906344339; NZ_LFXA01000007.1
2134; Sphingopyxis alaskensis RB2256, complete genome; 103485498;
NC_008048.1
2135; Sphingomonas wittichii RW1, complete genome; 148552929;
NC_009511.1
2136; Caulobacter sp. K31, complete genome; 167643973; NC_010338.1
2137; Asticcacaulis excentricus CB 48 chromosome 2, complete sequence;
315499382; NC_014817.1
2138; Nocardiopsis dassonvillei subsp. dassonvillei DSM 43111 chromosome 1,
complete sequence; 297558985; NC_014210.1
2139; Streptomyces wadayamensis strain A23 LGO_A2_AS7_C00257, whole
genome shotgun sequence; 910050821; NZ_JHDU01000034.1
2140; Tolypothrix bouteillei VB521301 scaffold_1, whole genome shotgun
sequence; 910242069; NZ_JHEG02000048.1
2141; Silvibacterium bohemicum strain S15 contig_3, whole genome shotgun
sequence; 910257956; NZ_LBHJ01000003.1
2142; Silvibacterium bohemicum strain S15 contig_3, whole genome shotgun
sequence; 910257956; NZ_LBHJ01000003.1
2143; Silvibacterium bohemicum strain S15 contig_30, whole genome shotgun
sequence; 910257973; NZ_LBHJ01000020.1
2144; Streptomyces sp. NRRL WC-3773 contig11.1, whole genome shotgun
sequence; 664481891; NZ_JOJI01000011.1
2145; Streptomyces peucetius strain NRRL WC-3868 contig49.1, whole genome
shotgun sequence; 665671804; NZ_JOCK01000052.1
2146; Xanthomonas citri pv. mangiferaeindicae LMG 941, whole genome shotgun
sequence; 381171950; NZ_CAH001000029.1
2147; Mesorhizobium sp. L2C084A000 scaffold0007, whole genome shotgun
sequence; 563938926; NZ_AYWX01000007.1
2148; Erythrobacter citreus LAMA 915 Contig13, whole genome shotgun
sequence; 914607448; NZ_JYNE01000028.1
2149; Bacillus flexus strain Riq5 contig_32, whole genome shotgun sequence;
914730676;NZ_LFQJ01000032.1
2150; Rhodanobacter thiooxydans LCS2 contig057, whole genome shotgun
sequence; 389809081; NZ_AJXWO1000057.1
2151; Frankia alni str. ACN14A chromosome, complete sequence; 111219505;
NC_008278.1
2152; Novosphingobium sp. PP1Y main chromosome, complete replicon;
334139601; NC_015580.1
2153; Salinibacter ruber M8 chromosome, complete genome; 294505815;
NC_014032.1
2154; Nocardiopsis sauna YIM 90010 contig_87, whole genome shotgun
sequence; 484023389; NZ_ANBF01000087.1
2155; Kitasatospora setae KM-6054 DNA, complete genome; 357386972;
NC_016109.1
2156; Arthrobacter sp. 161MFSha2.1 C567DRAFT_scaffold00006.6, whole
genome shotgun sequence; 484021228; NZ_KB895788.1
2157; Lamprocystis purpura DSM 4197 A390DRAFT_scaffold_01, whole
genome shotgun sequence; 483254584; NZ_KB902362.1
2158; Streptomyces sp. ATexAB-D23 B082DRAFT_scaffold_01, whole genome
shotgun sequence; 483975550; NZ_KB892001.1
2159; Lunatimonas lonarensis strain AK24 S14_contig_18, whole genome
shotgun sequence; 499123840; NZ_AQHR01000021.1
2160; Amycolatopsis benzoatilytica AK 16/65 AmybeDRAFT_scaffold1.1, whole
genome shotgun sequence; 486399859; NZ_KB912942.1
2161; Nocardia transvalensis NBRC 15921, whole genome shotgun sequence;
485125031; NZ_BAGL01000055.1
2162; Sphingomonas sp. YL-JM2C contig056, whole genome shotgun sequence;
661300723; NZ_ASTM01000056.1
2163; Butyrivibrio sp. XBB1001 G631DRAFT_scaffold00005.5_C, whole
genome shotgun sequence; 651376721; NZ_AUKA01000006.1
2164; Butyrivibrio fibrisolvens MD2001 G635DRAFT scaffold00033.33_C,
whole genome shotgun sequence; 652963937; NZ_AUKD01000034.1
2165; Butyrivibrio sp. NC3005 G634DRAFT scaffold00001.1, whole genome
shotgun sequence; 651394394; NZ_KE384206.1
2166; Shimazuella kribbensis DSM 45090 A3GQDRAFT_scaffold_0.1S, whole
genome shotgun sequence; 655370026; NZ_ATZFO1000001.1
2167; Shimazuella kribbensis DSM 45090 A3GQDRAFT_scaffold_5.6_C, whole
genome shotgun sequence; 655371438; NZ_ATZFO1000006.1
2168; Desulfobulbus mediterraneus DSM 13871 G494DRAFT_scaffold00028.28_C,
whole genome shotgun sequence; 655138083; NZ_AUCW01000035.1
2169; Cohnella thennotolerans DSM 17683 G485DRAFT_scaffold00041.41_C,
whole genome shotgun sequence; 652787974; NZ_AUCP01000055.1
2170; Azospirillum halopraeferens DSM 3675 G472DRAFT_scaffold00039.39_C,
whole genome shotgun sequence; 655967838; NZ_AUCF01000044.1
2171; Bacillus kribbensis DSM 17871 H539DRAFT_scaffold00003.3, whole
genome shotgun sequence; 651983111; NZ_KE387239.1
2172; Leptolyngbya sp. Heron Island J 67, whole genome shotgun sequence;
553740975; NZ_AWNH01000084.1
2173; Streptomyces sp. GXT6 genomic scaffold Scaffold4, whole genome
shotgun sequence; 654975403; NZ_KI601366.1
2174; Promicromonospora kroppenstedtii DSM 19349 ProkrDRAFT_PKA.71,
whole genome shotgun sequence; 739097522; NZ_KI911740.1
2175; Bacillus sp. J37 BacJ37DRAFT_scaffold_0.1S, whole genome shotgun
sequence; 651516582; NZ_JAEK01000001.1
2176; Prevotella oryzae DSM 17970 XylorDRAFT_X0A.1, whole genome
shotgun sequence; 738999090; NZ_KK073873.1
2177; Sphingobium sp. Ant17 Contig_45, whole genome shotgun sequence;
759429528; NZ_JEMV01000036.1
2178; Rubellimicrobium mesophilum DSM 19309 scaffold23, whole genome
shotgun sequence; 739419616; NZ_KK088564.1
2179; Butyrivibrio sp. MC2021 T359DRAFT_scaffold00010.10_C, whole
genome shotgun sequence; 651407979; NZ_JHXX01000011.1
2180; Clostridium beijerinckii HUN142 T483DRAFT_scaffold00004.4, whole
genome shotgun sequence; 652494892; NZ_KK211337.1
2181; Streptomyces sp. Tu 6176 scaffold00003, whole genome shotgun sequence;
740044478; NZ_KK106990.1
2182; Novosphingobium resinovorum strain KF1 contig000008, whole genome
shotgun sequence; 738615271; NZ_JFYZ01000008.1
2183; Novosphingobium resinovorum strain KF1 contig000015, whole genome
shotgun sequence; 738617000; NZ_JFYZ01000015.1
2184; Hyphomonas chukchiensis strain BH-BN04-4 contig29, whole genome
shotgun sequence; 736736050; NZ_AWFG01000029.1
2185; Thioclava dalianensis strain DLFJ1-1 contig2, whole genome shotgun
sequence; 740220529; NZ_JHEH01000002.1
2186; Thioclava indica strain DT23-4 contig29, whole genome shotgun sequence;
740292158; NZ_AUNB01000028.1
2187; Streptomyces albus subsp. albus strain NRRL B-1811 contig32.1, whole
genome shotgun sequence; 665618015; NZ_JODR01000032.1
2188; Kitasatospora sp. MBT66 scaffold3, whole genome shotgun sequence;
759755931; NZ_JAIY01000003.1
2189; Sphingomonas sp. DC-6 scaffold87, whole genome shotgun sequence;
662140302; NZ_JMUB01000087.1
2190; Sphingobium chlorophenolicum strain NBRC 16172 contig000062, whole
genome shotgun sequence; 739598481; NZ_JFHR01000062.1
2191; Nocardia sp. NRRL WC-3656 contig2.1, whole genome shotgun sequence;
663737675; NZ_JOJF01000002.1
2192; Streptomyces flavochromogenes strain NRRL B-2684 contig8.1, whole
genome shotgun sequence; 663317502; NZ_JNZ001000008.1
2193; Bacillus indicus strain DSM 16189 Contig01, whole genome shotgun
sequence; 737222016; NZ_JNVC02000001.1
2194; Streptomyces bicolor strain NRRL B-3897 contig42.1, whole genome
shotgun sequence; 671498318; NZ_JOFR01000042.1
2195; Streptomyces sp. NRRL WC-3719 contig152.1, whole genome shotgun
sequence; 665536304; NZ_JOCD01000152.1
2196; Streptomyces sp. NRRL F-5053 contig1.1, whole genome shotgun
sequence; 664356765; NZ_JOHT01000001.1
2197; Streptomyces sp. NRRL S-1868 contig54.1, whole genome shotgun
sequence; 664360925; NZ_JOGD01000054.1
2198; Streptomyces hygroscopicus subsp. hygroscopicus strain NRRL B-1477
contig8.1, whole genome shotgun sequence; 664299296; NZ_JOIK01000008.1
2199; Desulfobacter vibrioformis DSM 8776 Q366DRAFT_scaffold00036.35_C,
whole genome shotgun sequence; 737257311; NZ_JQKJ01000036.1
2200; Brevundimonas sp. EAKA contig5, whole genome shotgun sequence;
737322991; NZ_JMQR01000005.1
2201; Brevundimonas sp. EAKA contig5, whole genome shotgun sequence;
737322991; NZ_JMQR01000005.1
2202; Actinokineospora spheciospongiae strain EG49 contig1268_1, whole
genome shotgun sequence; 737301464; NZ_AYXG01000139.1
2203; Sphingobium sp. bal seq0028, whole genome shotgun sequence;
739622900; NZ_JPPQ01000069.1
2204; Rothia dentocariosa strain C6B contig_5, whole genome shotgun sequence;
739372122; NZ_JQHE01000003.1
2205; Rhodococcus fascians A21d2 contig10, whole genome shotgun sequence;
739287390; NZ_JMFA01000010.1
2206; Rhodococcus fascians LMG 3625 contig38, whole genome shotgun
sequence; 694033726; NZ_JMEM01000016.1
2207; Sphingopyxis sp. MWB1 contig00002, whole genome shotgun sequence;
696542396; NZ_JQFJ01000002.1
2208; Sphingobium yanoikuyae strain B1 scaffold1, whole genome shotgun
sequence; 739650776; NZ_KL662193.1
2209; Lysobacter daejeonensis GH1-9 contig23, whole genome shotgun sequence;
738180952; NZ_AVPU01000014.1
2210; Sphingomonas sp. 35-24ZXX contig11_scaffold4, whole genome shotgun
sequence; 728827031; NZ_JR0G01000008.1
2211; Sphingomonas sp. 37zxx contig3_scaffold2, whole genome shotgun
sequence; 728813405; NZ_JR0H01000003.1
2212; Actinoalloteichus spitiensis RMV-1378 Contig406, whole genome shotgun
sequence; 483112234; NZ_AGVX02000406.1
2213; Alistipes sp. ZOR0009 L990_140, whole genome shotgun sequence;
835319962; NZ_JTLD01000119.1
2214; Sphingopyxis sp. LC363 contig36, whole genome shotgun sequence;
739702045; NZ_JNFC01000030.1
2215; Sphingopyxis sp. LC81 contig24, whole genome shotgun sequence;
739659070; NZ_JNFD01000017.1
2216; Sphingomonas sp. Ant H11 contig_149, whole genome shotgun sequence;
730274767; NZ_JSBN01000149.1
2217; Novosphingobium malaysiense strain MUSC 273 Contig_11, whole genome
shotgun sequence; 746242072; NZ_JIDI01000011.1
2218; Novosphingobium subtenaneum strain DSM 12447 NJ75_contig000028,
whole genome shotgun sequence; 746290581; NZ_JRVC01000028.1
2219; Brevundimonas nasdae strain TPW30 Contig_13, whole genome shotgun
sequence; 746187665; NZ_JWSY01000013.1
2220; Desulfosporosinus youngiae DSM 17734 chromosome, whole genome
shotgun sequence; 374578721; NZ_CM001441.1
2221; Rivularia sp. PCC 7116, complete genome; 427733619; NC_019678.1
2222; Gorillibacterium massiliense strain G5, whole genome shotgun sequence;
750677319; NZ_CBQR020000171.1
2223; Nonomumea candida strain NRRL B-24552 contig8 1, whole genome
shotgun sequence; 759934284; NZ_JOAG01000009.1
2224; Mesorhizobium sp. SOD10, whole genome shotgun sequence; 751285871;
NZ_CCNA01000001.1
2225; Citrobacter pasteurii strain CIP 55.13, whole genome shotgun sequence;
749611130; NZ_CDHL01000044.1
2226; Cohnella kolymensis strain VKM B-2846 B2846_22, whole genome
shotgun sequence; 751596254; NZ_JXAL01000022.1
2227; Jeotgalibacillus campisalis strain SF-57 contig00001, whole genome
shotgun sequence; 751586078; NZ_ARR01000001.1
2228; Closltidium beijerinckii strain NCIMB 14988 genome; 754484184;
NZ_CP010086.1
2229; Novosphingobium sp. P6W scaffold17, whole genome shotgun sequence;
763097360; NZ_JXZE01000017.1
2230; Sphingomonas hengshuiensis strain WHSC-8, complete genome;
764364074; NZ_CP010836.1
2231; Sphingobium sp. YBL2, complete genome; 765344939; NZ_CP010954.1
2232; Methanobacterium formicicum genome assembly DSM1535,
chromosome: chr1; 851114167; NZ_LN515531.1
2233; Bacillus cereus genome assembly Bacillus JRS4, contig contig000025,
whole genome shotgun sequence; 924092470; CYHM01000025.1
2234; Frankia sp. DC12 FraDC12DRAFT_scaffold1.1, whole genome shotgun
sequence; 797224947; NZ_KQ031391.1
2235; Closltidium scatologenes strain ATCC 25775, complete genome;
802929558; NZ_CP009933.1
2236; Sphingomonas sp. SRS2 contig40, whole genome shotgun sequence;
806905234; NZ_LARW01000040.1
2237; Jiangella alkaliphila strain KCTC 19222 Scaffold1, whole genome shotgun
sequence; 820820518; NZ_KQ061219.1
2238; Erythrobacter marinus strain HWDM-33 contig3, whole genome shotgun
sequence; 823659049; NZ_LBHU01000003.1
2239; Luteimonas sp. FCS-9 scf7180000000226, whole genome shotgun
sequence; 825314728; NZ_LASZ01000003.1
2240; Sphingomonas parapaucimobilis NBRC 15100 BBPI01000030, whole
genome shotgun sequence; 755134941; NZ_BBPI01000030.1
2241; Sphingobium barthaii strain KK22, whole genome shotgun sequence;
646523831; NZ_BATN01000047.1
2242; Erythrobacter matinus strain HWDM-33 contig3, whole genome shotgun
sequence; 823659049; NZ_LBHU01000003.1
2243; Streptomyces avicenniae strain NRRL B-24776 contig3.1, whole genome
shotgun sequence; 919531973; NZ_JOEK01000003.1
2244; Sphingomonas sp. Y57 scaffold74, whole genome shotgun sequence;
826051019; NZ_LDES01000074.1
2245; Xanthomonas campestris strain CFSAN033089 contig_46, whole genome
shotgun sequence; 920684790; NZ_LHBW01000046.1
2246; Croceicoccus naphthovorans strain PQ-2, complete genome; 836676868;
NZ_CP011770.1
2247; Streptomyces caatingaensis strain CMAA 1322 contig09, whole genome
shotgun sequence; 906344341; NZ_LFXA01000009.1
2248; Paenibacillus sp. FJAT-27812 scaffold_0, whole genome shotgun sequence;
922780240; NZ_LIGH01000001.1
2249; Stenotrophomonas maltophilia strain ISMMS2R, complete genome;
923060045; NZ_CP011306.1
2250; Stenotrophomonas maltophilia strain ISMMS3, complete genome;
923067758; NZ_CP011010.1
2251; Hapalosiphon sp. MRB220 contig_91, whole genome shotgun sequence;
923076229; NZ_LIRN01000111.1
2252; Stenotrophomonas maltophilia strain B4 contig779, whole genome shotgun
sequence; 924516300; NZ_LDVR01000003.1
2253; Bacillus sp. FJAT-21352 Scaffold1, whole genome shotgun sequence;
924654439; NZ_LIU501000003.1
2254; Sphingopyxis sp. 113P3, complete genome; 924898949; NZ_CP009452.1
2255; Sphingopyxis sp. 113P3, complete genome; 924898949; NZ_CP009452.1
2256; Streptomyces sp. CFMR 7 strain CFMR-7, complete genome; 924911621;
NZ_CP011522.1
2257; Bacillus gobiensis strain FJAT-4402 chromosome; 926268043;
NZ_CP012600.1
2258; Streptomyces sp. XY431 P412contig111.1, whole genome shotgun
sequence; 926317398; NZ_LGDO01000015.1
2259; Streptomyces sp. NRRL F-6491 P443contig15.1, whole genome shotgun
sequence; 925610911; LGEE01000058.1
2260; Streptomyces sp. NRRL B-1140 P439contig15.1, whole genome shotgun
sequence; 926344107; NZ_LGEA01000058.1
2261; Streptomyces sp. NRRL B-1140 P439contig32.1, whole genome shotgun
sequence; 926344331; NZ_LGEA01000105.1
2262; Streptomyces sp. NRRL F-5755 P309contig48.1, whole genome shotgun
sequence; 926371517; NZ_LGCW01000271.1
2263; Streptomyces sp. NRRL F-5755 P309contig7.1, whole genome shotgun
sequence; 926371541; NZ_LGCW01000295.1
2264; Streptomyces sp. WM6378 P402contig63.1, whole genome shotgun
sequence; 926403453; NZ_LGDD01000321.1
2265; Streptomyces sp. WM6378 P402contig63.1, whole genome shotgun
sequence; 926403453; NZ_LGDD01000321.1
2266; Nocardia sp. NRRL S-836 P437contig39.1, whole genome shotgun
sequence; 926412104; NZ_LGDY01000113.1
2267; Paenibacillus sp. A59 contig_353, whole genome shotgun sequence;
927084730; NZ_LITU01000050.1
2268; Paenibacillus sp. A59 contig_416, whole genome shotgun sequence;
927084736; NZ_L1TU01000056.1
2269; Streptomyces sp. NRRL S-444 contig322.4, whole genome shotgun
sequence; 797049078; JZWX01001028.1
2270; Altererythrobacter atlanticus strain 26DY36, complete genome; 927872504;
NZ_CP011452.2
2271; Streptomyces chattanoogensis strain NRRL ISP-5002 ISP5002contig8.1,
whole genome shotgun sequence; 928897585; NZ_LGKG01000196.1
2272; Streptomyces chattanoogensis strain NRRL ISP-5002 ISP5002contig9.1,
whole genome shotgun sequence; 928897596; NZ_LGKG01000207.1
2273; Ideonella sakaiensis strain 201-F6, whole genome shotgun sequence;
928998724; NZ_BBYR01000007.1
2274; Ideonella sakaiensis strain 201-F6, whole genome shotgun sequence;
928998800; NZ_BBYR01000083.1
2275; Bacillus sp. FJAT-28004 scaffold 2, whole genome shotgun sequence;
929005248; NZ_LGHP01000003.1
2276; Novosphingobium sp. AAP1 AAP1Contigs7, whole genome shotgun
sequence; 930029075; NZ_LJHO01000007.1
2277; Novosphingobium sp. AAP1 AAP1Contigs9, whole genome shotgun
sequence; 930029077; NZ_LJHO01000009.1
2278; Actinobacteria bacterium OK074 ctg60, whole genome shotgun sequence;
930473294; NZ_LJCV01000275.1
2279; Actinobacteria bacterium OK006 ctg112, whole genome shotgun sequence;
930490730; NZ_UCUO1000014.1
2280; Frankia sp. R43 contig001, whole genome shotgun sequence; 937182893;
NZ_LFCW01000001.1
2281; Sphingopyxis macrogoltabida strain EY-1, complete genome; 937372567;
NZ_CP012700.1
2282; Xanthomonas arboricola strain CITA 44 CITA_44_contig_26, whole
genome shotgun sequence; 937505789; NZ_LJGM01000026.1
2283; Stenotrophomonas acidaminiphila strain ZAC14D2 NAIMI4 2, complete
genome; 938883590; NZ_CP012900.1
2284; Sphingopyxis macrogoltabida strain 203, complete genome; 938956730;
NZ_CP009429.1
2285; Sphingopyxis macrogoltabida strain 203, complete genome; 938956730;
NZ_CP009429.1
2286; Sphingopyxis macrogoltabida strain 203 plasmid, complete sequence;
938956814; NZ_CP009430.1
2287; Cellulosilyticum ruminicola JCM 14822, whole genome shotgun sequence;
938965628; NZ_BBCG01000065.1
2288; Brevundimonas sp. DS20, complete genome; 938989745; NZ_CP012897.1
2289; Brevundimonas sp. DS20, complete genome; 938989745; NZ_CP012897.1
2290; Paenibacillus sp. GD6, whole genome shotgun sequence; 939708098;
NZ_LN831198.1
2291; Paenibacillus sp. GD6, whole genome shotgun sequence; 939708105;
NZ_LN831205.1
2292; Alicyclobacillus ferrooxydans strain TC-34 contig_22, whole genome
shotgun sequence; 940346731; NZ_LJC001000107.1
2293; Xanthomonas sp. Mitacek01 contig_17, whole genome shotgun sequence;
941965142; NZ_LKIT01000002.1
2294; Streptomyces bingchenggensis BCW-1, complete genome; 374982757;
NC_016582.1
2295; Streptomyces pactum strain ACT12 scaffold1, whole genome shotgun
sequence; 943388237; NZ_LIQD01000001.1
2296; Streptomyces flocculus strain NRRL B-2465 B2465_contig_205, whole
genome shotgun sequence; 943674269; NZ_LIQO01000205.1
2297; Streptomyces aurantiacus strain NRRL ISP-5412 ISP-5412_contig_138,
whole genome shotgun sequence; 943881150; NZ_LIPP01000138.1
2298; Streptomyces graminilatus strain NRRL B-59124 B59124_contig_7, whole
genome shotgun sequence; 943897669; NZ_LIQQ01000007.1
2299; Streptomyces alboniger strain NRRL B-1832 B-1832_contig_37, whole
genome shotgun sequence; 943898694; NZ_LIQN01000037.1
2300; Streptomyces alboniger strain NRRL B-1832 B-1832_contig_384, whole
genome shotgun sequence; 943899498; NZ_LIQN01000384.1
2301; Streptomyces kanamyceticus strain NRRL B-2535 B-2535_contig_122,
whole genome shotgun sequence; 943922224; NZ_LIQUo1000122.1
2302; Streptomyces luridiscabiei strain NRRL B-24455 B24455 contig_315,
whole genome shotgun sequence; 943927948; NZ_LIQV01000315.1
2303; Streptomyces attiruber strain NRRL B-24165 contig_124, whole genome
shotgun sequence; 943949281; NZ_LIPN01000124.1
2304; Streptomyces hirsutus strain NRRL B-2713 B2713_contig_57, whole
genome shotgun sequence; 944005810; NZ_LIQT01000057.1
2305; Streptomyces aureus strain NRRL B-2808 contig_171, whole genome
shotgun sequence; 944012845; NZ_LIPQ01000171.1
2306; Streptomyces phaeochromogenes strain NRRL B-1248 B-1248_contig_126,
whole genome shotgun sequence; 944029528; NZ_LIQZ01000126.1
2307; Streptomyces torulosus strain NRRL B-3889 B-3889_contig_18, whole
genome shotgun sequence; 944495433; NZ_LIRK01000018.1
2308; Frankia alni str. ACN14A chromosome, complete sequence; 111219505;
NC_008278.1
2309; Sphingomonas sp. Leaf20 contig_1, whole genome shotgun sequence;
947349881; NZ_LMKN01000001.1
2310; Paenibacillus sp. Leaf72 contig_6, whole genome shotgun sequence;
947378267; NZ_LMLV01000032.1
2311; Sphingomonas sp. Leaf230 contig_4, whole genome shotgun sequence;
947401208; NZ_LMKW01000010.1
2312; Sanguibacter sp. Leaf3 contig_2, whole genome shotgun sequence;
947472882; NZ_LMRH01000002.1
2313; Aeromicrobium sp. Root344 contig_1, whole genome shotgun sequence;
947552260; NZ_LMDH01000001.1
2314; Sphingopyxis sp. Root1497 contig_3, whole genome shotgun sequence;
947689975; NZ_LMGF01000003.1
2315; Sphingomonas sp. Root720 contig_7, whole genome shotgun sequence;
947704642; NZ_LMID01000015.1
2316; Sphingomonas sp. Root720 contig_8, whole genome shotgun sequence;
947704650; NZ_LMID01000016.1
2317; Sphingomonas sp. Root710 contig_1, whole genome shotgun sequence;
947721816; NZ_LM1B01000001.1
2318; Mesorhizobium sp. Root172 contig_2, whole genome shotgun sequence;
947919015; NZ_LMHP01000012.1
2319; Mesorhizobium sp. Root102 contig_3, whole genome shotgun sequence;
947937119; NZ_LMCP01000023.1
2320; Paenibacillus sp. Soil750 contig_1, whole genome shotgun sequence;
947966412; NZ_LMSD01000001.1
2321; Paenibacillus sp. Soi1522 contig_3, whole genome shotgun sequence;
947983982; NZ_LMRV01000044.1
2322; Paenibacillus sp. Root52 contig_3, whole genome shotgun sequence;
948045460; NZ_LMF001000023.1
2323; Bacillus sp. Soi1768D1 contig_5, whole genome shotgun sequence;
950170460; NZ_LMTA01000046.1
2324; Paenibacillus sp. Root444D2 contig_4, whole genome shotgun sequence;
950271971; NZ_LME001000034.1
2325; Paenibacillus sp. Soi1766 contig_32, whole genome shotgun sequence;
950280827; NZ_LMSJ01000026.1
2326; Streptococcus pneumoniae strain type strain: N, whole genome shotgun
sequence; 950938054; NZ_CIHL01000007.1
2327; Streptomyces sp. Root1310 contig_5, whole genome shotgun sequence;
951121600; NZ_LMEQ01000031.1
2328; Bacillus muralis strain DSM 16288 Scaffold4, whole genome shotgun
sequence; 951610263; NZ_LMBV01000004.1
2329; Closliidium butyricum strain KNU-L09 chromosome 1, complete sequence;
959868240; NZ_CP013252.1
2330; Gorillibacterium sp. SN4, whole genome shotgun sequence; 960412751;
NZ_LN881722.1
2331; Thalassobius activus strain CECT 5114, whole genome shotgun sequence;
960424655; NZ_CYUE01000025.1
2332; Microbacterium testaceum strain NS283 contig_37, whole genome shotgun
sequence; 969836538; NZ_LDRU01000037.1
2333; Microbacterium testaceum strain NS183 contig_65, whole genome shotgun
sequence; 969919061; NZ_LDRR01000065.1
2334; Sphingopyxis sp. H050 H050 c0ntig000006, whole genome shotgun
sequence; 970555001; NZ_LNRZ01000006.1
2335; Paenibacillus polymyxa strain KF-1 scaffold00001, whole genome shotgun
sequence; 970574347; NZ_LNZFO1000001.1
2336; Luteimonas abyssi strain XH031 Scaffold1, whole genome shotgun
sequence; 970579907; NZ_KQ759763.1

TABLE 4
Exemplary Lasso Cyclase
Lasso Cyclase Peptide No: #; Species of Origin; GI#; Accession#

2337; Uncultured marine bacterium 463 clone EBAC080-
L32B05 genomic sequence; 41582259; AY458641.2
2338; Burkholderia pseudomallei strain BEF DP42. Contig323,
whole genome shotgun sequence; 686949962; JPNR01000131.1
2339; Burkholderia thailandensis E264 chromosome I,
complete sequence; 83718394; NC_007651.1
2340; Frankia sp. Thr ThrDRAFT_scaffold_48.49, whole
genome shotgun sequence; 602261491; JENI01000049.1
2341; Frankia sp. Thr ThrDRAFT_scaffold_48.49, whole
genome shotgun sequence; 602261491; JENI01000049.1
2342; Sphingopyxis alaskensis RB2256, complete genome;
103485498; NC_008048.1
2343; Sphingopyxis alaskensis RB2256, complete genome;
103485498; NC_008048.1
2344; Streptococcus suis strain LS8I, whole genome shotgun
sequence; 766595491; NZ_CEHM01000004.1
2345; Streptococcus suis SC84 complete genome, strain
SC84; 253750923; NC_012924.1
2346; Geobacter uraniireducens Rf4, complete genome;
148262085; NC_009483.1
2347; Geobacter uraniireducens Rf4, complete genome;
148262085; NC_009483.1
2348; Sphingomonas wittichii RW1, complete genome;
148552929; NC_009511.1
2349; Caulobacter sp. K31, complete genome; 167643973;
NC_010338.1
2350; Phenylobacterium zucineum HLK1, complete
genome; 196476886; CP000747.1
2351; Phenylobacterium zucineum HLK1, complete genome;
196476886; CP000747.1
2352; Sanguibacter keddieii DSM 10542, complete genome;
269793358; NC_013521.1
2353; Xylanimonas cellulosilytica DSM 15894, complete
genome; 269954810; NC_013530.1
2354; Spirosoma linguale DSM 74, complete genome;
283814236; CP001769.1
2355; Stackebrandtia nassauensis DSM 44728, complete
genome; 291297538; NC_013947.1
2356; Caulobacter segnis ATCC 21756, complete genome;
295429362; CP002008.1
2357; Streptomyces bingchenggensis BCW-1, complete genome;
374982757; NC_016582.1
2358; Streptomyces bingchenggensis BCW-1, complete genome;
374982757; NC_016582.1
2359; Gallionella capsifeniformans ES-2, complete genome;
302877245; NC_014394.1
2360; Asticcacaulis excentricus CB 48 chromosome 1, complete
sequence; 315497051; NC_014816.1
2361; Burkholderia gladioli BSR3 chromosome 1, complete
sequence; 327367349; CP002599.1
2362; Mycobacterium sinense strain JDM601, complete
genome; 333988640; NC_015576.1
2363; Sphingobium chlorophenolicum L-1 chromosome 1,
complete sequence; 334100279; CP002798.1
2364; Streptomyces violaceusniger Tu 4113, complete genome;
345007964; NC_015957.1
2365; Rhodospirillum rubrum F11, complete genome; 386348020;
NC_017584.1
2366; Actinoplanes sp. SE50/110, complete genome;
386845069; NC_017803.1
2367; Emticicia oligotrophica DSM 17448, complete
genome; 408671769; NC_018748.1
2368; Tistrella mobilis KA081020-065 plasmid pTM1, complete
sequence; 442559580; NC_017957.2
2369; Bacillus thuringiensis MC28, complete genome;
407703236; NC_018693.1
2370; Nostoc sp. PCC 7107, complete genome; 427705465;
NC_019676.1
2371; Synechococcus sp. PCC 6312, complete genome;
427711179; NC_019680.1
2372; Stanieria cyanosphaera PCC 7437, complete
genome; 428267688; CP003653.1
2373; Desulfocapsa sulfexigens DSM 10523, complete
genome; 451945650; NC_020304.1
2374; Xanthomonas citri pv. mangiferaeindicae LMG 941, whole
genome shotgun sequence; 381169556; NZ_CAHO01000002.1
2375; Streptomyces fulvissimus DSM 40593, complete
genome; 488607535; NC_021177.1
2376; Streptomyces rapamycinicus NRRL 5491 genome;
521353217; CP006567.1
2377; Gloeobacter kilaueensis JS1, complete genome;
554634310; NC_022600.1
2378; Kutzneria albida DSM 43870, complete genome;
754862786; NZ_CP007155.1
2379; Mesorhizobium huakuii 7653R genome; 657121522;
CP006581.1
2380; Burkholderia thailandensis E264 chromosome I,
complete sequence; 83718394; NC_007651.1
2381; Sphingopyxis fiibergensis strain Kp5.2, complete
genome; 749188513; NZ_CP009122.1
2382; Sphingopyxis fiibergensis strain Kp5.2, complete
genome; 749188513; NZ_CP009122.1
2383; Streptomyces sp. ZJ306 hydroxylase, deacetylase, and
hypothetical proteins genes, complete cds; ikarugamycin gene
cluster, complete sequence; and GCN5-related N-acetyltransferase,
hypothetical protein, asparagine synthase, transcriptional
regulator, ABC transporter, hypothetical proteins, putative
membrane transport protein, putative acetyltransferase,
cytochrome P450, putative alpha-glucosidase, phosphoketolase,
helix-turn-helix domain-containing protein,
membrane protein, NAD-dependent epimera; 746616581;
KF954512.1
2384; Streptomyces albus strain DSM 41398, complete genome;
749658562; NZ_CP010519.1
2385; Amycolatopsis lurida NRRL 2430, complete genome;
755908329; CP007219.1
2386; Streptomyces lydicus A02, complete genome; 822214995;
NZ_CP007699.1
2387; Streptomyces lydicus A02, complete genome; 822214995;
NZ_CP007699.1
2388; Streptomyces lydicus A02, complete genome; 822214995;
NZ_CP007699.1
2389; Streptomyces xiamenensis strain 318, complete genome;
921170702; NZ_CP009922.2
2390; Streptomyces xiamenensis strain 318, complete genome;
921170702; NZ_CP009922.2
2391; Uncultured bacterium clone AZ25P121 genomic sequence;
818476494; KP274854.1
2392; Streptomyces sp. PBH53 genome; 852460626; CP011799.1
2393; Streptomyces sp. PBH53 genome; 852460626; CP011799.1
2394; Streptomyces sp. PBH53 genome; 852460626; CP011799.1
2395; Sphingopyxis sp. 113P3, complete genome; 924898949;
NZ_CP009452.1
2396; Sphingopyxis sp. 113P3, complete genome; 924898949;
NZ_CP009452.1
2397; Bifidobacterium longum subsp infantis strain BT1,
complete genome; 927296881; CP010411.1
2398; Nostoc piscinale CENA21 genome; 930349143; CP012036.1
2399; Citromicrobium sp. JL477, complete genome; 932136007;
CP011344.1
2400; Sphingopyxis macrogoltabida strain 203, complete genome;
938956730; NZ_CP009429.1
2401; Sphingopyxis macrogoltabida strain 203 plasmid,
complete sequence; 938956814; NZ_CP009430.1
2402; Paenibacillus sp. 32O-W, complete genome; 961447255;
CP013653.1
2403; Streptomyces avermitilis MA-4680 = NBRC 14893,
complete genome; 162960844; NC_003155.4
2404; Streptomyces avermitilis MA-4680 = NBRC 14893,
complete genome; 162960844; NC_003155.4
2405; Kitasatospora setae KM-6054 DNA, complete genome;
357386972; NC_016109.1
2406; Rhodococcus jostii lariatin biosynthetic gene cluster (larA,
larB, larC, larD, larE), complete cds; 380356103dbjAB593691.1; 0
2407; Rubrivivax gelatinosus IL144 DNA, complete genome;
383755859; NC_017075.1
2408; Pseudomonas sp. Os17 DNA, complete genome;
771839907dbjAP014627.1; 0
2409; Pseudomonas sp. St29 DNA, complete genome;
771846103dbjAP014628.1; 0
2410; Fischerella sp. NIES-3754 DNA, complete genome;
965684975dbjAP017305.1; 0
2411; Magnetospirillum gryphiswaldense MSR-1 v2, complete
genome; 568144401; NC_023065.1
2412; Magnetospirillum gryphiswaldense MSR-1 v2, complete
genome; 568144401; NC_023065.1
2413; Streptococcus suis SC84 complete genome, strain SC84;
253750923; NC_012924.1
2414; Salinibacter ruber M8 chromosome, complete genome;
294505815; NC_014032.1
2415; Enterococcus faecalis ATCC 29212 contig24, whole
genome shotgun sequence; 401673929; ALOD01000024.1
2416; Saccharothrix espanaensis DSM 44229 complete genome;
433601838; NC_019673.1
2417; Roseburia sp. CAG: 197 WGS project CBBL01000000
data, contig, whole genome shotgun sequence; 524261006;
CBBL010000225.1
2418; Roseburia sp. CAG: 197 WGS project CBBL01000000
data, contig, whole genome shotgun sequence; 524261006;
CBBL010000225.1
2419; Clostridium sp. CAG: 221 WGS project CBDC01000000
data, contig, whole genome shotgun sequence; 524362382;
CBDC010000065.1
2420; Clostridium sp. CAG: 411 WGS project CBIY01000000 data,
contig, whole genome shotgun sequence; 524742306;
CBIY010000075.1
2421; Roseburia sp. CAG: 100 WGS project CBKV01000000 data,
contig, whole genome shotgun sequence; 524842500;
CBKV010000277.1
2422; Novosphingobium sp. KN65.2 WGS project CCBH000000000
data, contig SPHy1_Contig_228, whole genome shotgun sequence;
808402906; CCBH010000144.1
2423; Mesorhizobium plurifarium genome assembly Mesorhizobium
plurifarium ORS1032T genome assembly, contig MPL1032_Contig_21,
whole genome shotgun sequence; 927916006; CCND01000014.1
2424; Kibdelosporangium sp. MJ126-NF4, whole genome shotgun
sequence; 754819815; NZ_CDME01000002.1
2425; Kibdelosporangium sp. MJ126-NF4 genome assembly High
quaKibdelosporangium sp. MJ126-NF4, scaffold BPA_8, whole
genome shotgun sequence; 747653426; CDME01000011.1
2426; Methanobacterium formicicum genome assembly isolate
Mb9, chromosome: I; 952971377; LN734822.1
2427; Streptococcus pneumoniae strain 37, whole genome shotgun
sequence; 912648153; NZ_CKHR01000004.1
2428; Streptococcus pneumoniae genome assembly 6631_3#4,
scaffold ERS019570SCcontig000005, whole genome shotgun
sequence; 879201007; CKIK01000005.1
2429; Streptococcus pneumoniae strain type strain: N, whole
genome shotgun sequence; 950938054; NZ_CIHL01000007.1
2430; Streptococcus pneumoniae strain 37, whole genome
shotgun sequence; 912648153; NZ_CKHR01000004.1
2431; Klebsiella variicola genome assembly Kv4880, contig
BN1200_Contig_75, whole genome shotgun sequence; 906292938;
CXPB01000073.1
2432; Klebsiella variicola genome assembly KvT29A, contig
BN1200_Contig_98, whole genome shotgun sequence; 906304012;
CXPA01000125.1
2433; Bacillus cereus genome assembly Bacillus JRS4, contig
contig000025, whole genome shotgun sequence; 924092470;
CYHM01000025.1
2434; Achromobacter sp. 27895TDY5663426 genome assembly,
contig. ERS372662SCcontig000003, whole genome shotgun
sequence; 928675838; CYTQ01000003.1
2435; Pedobacter sp. BAL39 1103467000492, whole genome
shotgun sequence; 149277373; NZ_ABCM01000005.1
2436; Streptomyces sp. Mg1 supercont1.100, whole genome
shotgun sequence; 254387191; NZ_D5570483.1
2437; Streptomyces sviceus ATCC 29083 chromosome, whole
genome shotgun sequence; 297196766; NZ_CM000951.1
2438; Streptomyces pristinaespiralis ATCC 25486 chromosome,
whole genome shotgun sequence; 297189896; NZ_CM000950.1
2439; Enterococcus faecalis ATCC 4200 supercont1.2, whole
genome shotgun sequence; 239948580; NZ_GG670372.1
2440; Enterococcus faecalis ATCC 29212 contig24, whole genome
shotgun sequence; 401673929; ALOD01000024.1
2441; Streptomyces roseosporus NRRL 15998 supercont3.1 genomic
scaffold, whole genome shotgun sequence; 221717172; D5999644.1
2442; Streptococcus vestibularis F0396 ctg1126932565723, whole
genome shotgun sequence; 311100538; AEKO01000007.1
2443; Streptococcus vestibularis F0396 ctg1126932565723, whole
genome shotgun sequence; 311100538; AEKO01000007.1
2444; Ruminococcus albus 8 contig00035, whole genome shotgun
sequence; 325680876; NZ_ADKM02000123.1
2445; Streptomyces sp. W007 contig00293, whole genome shotgun
sequence; 365867746; NZ_AGSW01000272.1
2446; Streptomyces sp. W007 contig00241, whole genome shotgun
sequence; 365866490; NZ_AGSW01000226.1
2447; Burkholderia pseudomallei 1258a Contig0089, whole genome
shotgun sequence; 418540998; NZ_AHJB01000089.1
2448; Burkholderia pseudomallei 1026a Contig0036, whole genome
shotgun sequence; 385360120; AHJA01000036.1
2449; Rhodanobacter sp. 115 contig437, whole genome shotgun
sequence; 389759651; NZ_AJXS01000437.1
2450; Rhodanobacter thiooxydans LCS2 contig057, whole
genome shotgun sequence; 389809081; NZ_AJXW01000057.1
2451; Burkholderia thailandensis MSMB43 Scaffold3, whole
genome shotgun sequence; 424903876; NZ_JH692063.1
2452; Streptomyces auratus AGR0001 Scaffold1, whole
genome shotgun sequence; 398790069; NZ_JH725387.1
2453; Actinomyces naeslundii str. Howell 279 ctg1130888818142,
whole genome shotgun sequence; 399903251; ALJK01000024.1
2454; Enterococcus faecalis ATCC 29212 contig24, whole
genome shotgun sequence; 401673929; ALOD01000024.1
2455; Uncultured bacterium ACD_75C02634, whole genome
shotgun sequence; 406886663; AMFJ01033303.1
2456; Amycolatopsis decaplanina DSM 44594 Contig0055,
whole genome shotgun sequence; 458848256; NZ_AOHO01000055.1
2457; Streptomyces mobaraensis NBRC 13819 = DSM 40847
contig024, whole genome shotgun sequence; 458977979;
NZ_AORZ01000024.1
2458; Burkholderia pseudomallei MSHR1043 seq0003, whole
genome shotgun sequence; 469643984; AOGU01000003.1
2459; Enterococcus faecalis EnGen0363 strain RMC5 acAqY-
supercont1.4, whole genome shotgun sequence; 502232520;
NZ_KB944632.1
2460; Enterococcus faecalis EnGen0233 strain UAA1014 acvJV-
supercont1.10.C18, whole genome shotgun sequence; 487281881;
AIZW01000018.1
2461; Pandoraea sp. SD6-2 scaffold29, whole genome shotgun
sequence; 505733815; NZ_KB944444.1
2462; Streptomyces aurantiacus JA 4570 Seq28, whole genome
shotgun sequence; 514916412; NZ_AOPZ01000028.1
2463; Streptomyces aurantiacus JA 4570 Seq17, whole genome
shotgun sequence; 514916021; NZ_AOPZ01000017.1
2464; Enterococcus faecalis LA3B-2 Scaffold22, whole genome
shotgun sequence; 522837181; NZ_KE352807.1
2465; Paenibacillus alvei A6-6i-x PAAL66ix 14, whole genome
shotgun sequence; 528200987; ATMS01000061.1
2466; Dehalobacter sp. UNSWDHB Contig_139, whole genome
shotgun sequence; 544905305; NZ_AUUR01000139.1
2467; Actinobaculum sp. oral taxon 183 str. F0552 Scaffold15,
whole genome shotgun sequence; 545327527; NZ_KE951412.1
2468; Actinobaculum sp. oral taxon 183 str. F0552 Scaffold1,
whole genome shotgun sequence; 545327174; NZ_KE951406.1
2469; Propionibacterium acidifaciens F0233 ctg1127964738299,
whole genome shotgun sequence; 544249812; ACVN02000045.1
2470; Rubidibacter lacunae KORDI 51-2 KR5 l_contig00121,
whole genome shotgun sequence; 550281965; NZ_ASSJ01000070.1
2471; Rothia aeria F0184 R aeriaHMPREF0742-1.0_Cont136.4,
whole genome shotgun sequence; 551695014; AXZG01000035.1
2472; Candidatus Halobonum tyrrellensis G22 contig00002,
whole genome shotgun sequence; 557371823; NZ_ASGZ01000002.1
2473; Streptomyces niveus NCIMB 11891 chromosome, whole
genome shotgun sequence; 566146291; NZ_CM002280.1
2474; Blastomonas sp. CACIA14H2 contig00049, whole
genome shotgun sequence; 563282524; AYSC01000019.1
2475; Frankia sp. CcI6 CcI6DRAFT_scaffold_51.52, whole
genome shotgun sequence; 563312125; AYTZ01000052.1
2476; Frankia sp. CcI6 CcI6DRAFT_scaffold_16.17, whole
genome shotgun sequence; 564016690; NZ_AYTZ01000017.1
2477; Clostridium butyricum DORA_1 Q607_CBUC00058,
whole genome shotgun sequence; 566226100; AZLX01000058.1
2478; Streptococcus sp. DORA_10 Q617_5P5C00257, whole
genome shotgun sequence; 566231608; AZMH01000257.1
2479; Candidatus Entotheonella factor TSY1_contig00913, whole
genome shotgun sequence; 575408569; AZHW01000959.1
2480; Candidatus Entotheonellagemina TSY2_contig00559,
whole genome shotgun sequence; 575423213; AZHX01000559.1
2481; Streptomyces roseosporus NRRL 11379 supercont4.1, whole
genome shotgun sequence; 588273405; NZ_ABYX02000001.1
2482; Frankia sp. Thr ThrDRAFT_scaffold_48.49, whole
genome shotgun sequence; 602261491; JENI01000049.1
2483; Frankia sp. CcI6 CcI6DRAFT_scaffold_51.52, whole genome
shotgun sequence; 563312125; AYTZ01000052.1
2484; Frankia sp. Thr ThrDRAFT_scaffold_28.29, whole genome
shotgun sequence; 602262270; JENI01000029.1
2485; Novosphingobium resinovorum strain KF1 contig000008,
whole genome shotgun sequence; 738615271; NZ_JFYZ01000008.1
2486; Novosphingobium resinovorum strain KF1 contig000008,
whole genome shotgun sequence; 738615271; NZ_JFYZ01000008.1
2487; Brevundimonas abyssalis TAR-001 DNA, contig: BAB005,
whole genome shotgun sequence; 543418148dbjBATC01000005.1; 0
2488; Bacillus akibai JCM 9157, whole genome shotgun sequence;
737696658; NZ_BAUV01000025.1
2489; Bacillus akibai JCM 9157, whole genome shotgun sequence;
737696658; NZ_BAUV01000025.1
2490; Bacillus boroniphilus JCM 21738 DNA, contig: contig_6,
whole genome shotgun sequence; 571146044dbjBAUW01000006.1; 0
2491; Bacillus sp. 17376 scaffold00002, whole genome shotgun
sequence; 560433869; NZ_K1547189.1
2492; Gracilibacillus boraciitolerans JCM 21714 DNA,
contig: contig_30, whole genome shotgun sequence;
575082509dbjBAVS01000030.1; 0
2493; Gracilibacillus boraciitolerans JCM 21714 DNA,
contig: contig_30, whole genome shotgun sequence;
575082509dbjBAVS01000030.1; 0
2494; Bacterium endosymbiont of Mortierella elongata FMR23-6,
whole genome shotgun sequence; 779889750; NZ_DF850521.1
2495; Sphingopyxis sp. C-1 DNA, contig: contig_1, whole genome
shotgun sequence; 834156795dbjBBRO01000001.1; 0
2496; Sphingopyxis sp. C-1 DNA, contig: contig_1, whole genome
shotgun sequence; 834156795dbjBBRO01000001.1; 0
2497; Sphingopyxis sp. C-1 DNA, contig: contig_1, whole genome
shotgun sequence; 834156795dbjBBRO01000001.1; 0
2498; Ideonella sakaiensis strain 201-F6, whole genome shotgun
sequence; 928998724; NZ_BBYR01000007.1
2499; Brevundimonas sp. EAKA contig5, whole genome shotgun
sequence; 737322991; NZ_JMQR01000005.1
2500; Streptomyces griseorubens strain JSD-1 scaffold1, whole
genome shotgun sequence; 739792456; NZ_KL503830.1
2501; Frankia sp. Thr ThrDRAFT_scaffold 28.29, whole
genome shotgun sequence; 602262270; JENI01000029.1
2502; Frankia sp. Allo2 ALLO2DRAFT scaffold 25.26, whole
genome shotgun sequence; 737764929; NZ_JPHT01000026.1
2503; Frankia sp. CcI6 CcI6DRAFT_scaffold_16.17, whole
genome shotgun sequence; 564016690; NZ_AYTZ01000017.1
2504; Bifidobacterium reuteri DSM 23975 Contig04, whole
genome shotgun sequence; 672991374; JGZK01000004.1
2505; Streptomyces sp. JS01 contig2, whole genome
shotgun sequence; 695871554; NZ_JPWW01000002.1
2506; Sphingopyxis sp. LC81 contig28, whole genome
shotgun sequence; 686470905; JNFD01000021.1
2507; Sphingopyxis sp. LC81 contig24, whole genome
shotgun sequence; 739659070; NZ_JNFD01000017.1
2508; Sphingopyxis sp. LC363 contig36, whole genome
shotgun sequence; 739702045; NZ_JNFC01000030.1
2509; Burkholderia pseudomallei strain BEF DP42.Contig323,
whole genome shotgun sequence; 686949962; JPNR01000131.1
2510; Xanthomonas cannabis pv. phaseoli strain Nyagatare scf_52938_
7, whole 0 genome shotgun sequence; 835885587; NZ_KN265462.1
2511; Burkholderia pseudomallei MSHR1000 scaffold1, whole
genome shotgun 0 sequence; 740963677; NZ_KN323065.1
2512; Burkholderia pseudomallei M5HR435 Y033. Contig530,
whole genome shotgun sequence; 715120018; JRFP01000024.1
2513; Candidatus Thiomargarita nelsonii isolate Hydrate Ridge contig
1164, whole genome shotgun sequence; 723288710; JSZA01001164.1
2514; Paenibacillus sp. P1XP2 CM49_contig000046, whole
genome shotgun sequence; 727078508; JRNV01000046.1
2515; Novosphingobium sp. P6W scaffold9, whole genome
shotgun sequence; 763095630; NZ_JXZE01000009.1
2516; Streptomyces griseus strain S4-7 contig113, whole genome
shotgun sequence; 764464761; NZ_JYBE01000113.1
2517; Lechevalieria aerocolonigenes strain NRRL B-16140 contig11.3,
whole genome shotgun sequence; 772744565; NZ_JYJG01000059.1
2518; Desulfobulbaceae bacterium BRH_c16a BRHa_1001515,
whole genome shotgun sequence; 780791108; LADS01000058.1
2519; Peptococcaceae bacterium BRH_c4b BRHa_1001357,
whole genome shotgun sequence; 780813318; LADO01000010.1
2520; Peptococcaceae bacterium BRH_c4b BRHa_1001357,
whole genome shotgun sequence; 780813318; LADO01000010.1
2521; Hyphomonadaceae bacterium BRH_c29 BRHa_1005676,
whole genome shotgun sequence; 780821511; LADW01000068.1
2522; Hyphomonas sp. BRH_c22 BRHa_1001979, whole
sequence; 780834515; LADU01000087.1
2523; Streptomyces rubellomurinus subsp. indigoferus strain
ATCC 31304 contig-55, whole genome shotgun sequence;
783374270; NZ_JZKG01000056.1
2524; Streptomyces sp. NRRL S-444 contig322.4, whole
genome shotgun sequence; 797049078; JZWX01001028.1
2525; Streptomyces sp. NRRL B-1568 contig-76, whole
genome shotgun sequence; 799161588; NZ_JZWZ01000076.1
2526; Candidate division TM6 bacterium GW2011_GWF2_36_131
US03_C0013, whole genome shotgun sequence; 818310996;
LBRK01000013.1
2527; Sphingobium czechense LL01 25410_1, whole genome
shotgun sequence; 861972513; JACT01000001.1
2528; Streptomyces caatingaensis strain CMAA 1322 contig02,
whole genome shotgun sequence; 906344334; NZ_LFXA01000002.1
2529; Erythrobacter citreus LAMA 915 Contig13, whole genome
shotgun sequence; 914607448; NZ_JYNE01000028.1
2530; Paenibacillus polymyxa strain YUPP-8 scaffold32, whole
genome shotgun sequence; 924434005; LIYK01000027.1
2531; Burkholderia mallei GB8 horse 4 contig_394, whole genome
shotgun sequence; 67639376; NZ_AAHO01000116.1
2532; Streptomyces rimosus subsp. rimosus strain NRRL WC-3909
P217contig95.1, whole genome shotgun sequence; 925286515;
LGCO01000284.1
2533; Streptomyces rimosus subsp. rimosus strain NRRL WC-3909
P217contig56.1, whole genome shotgun sequence; 925291008;
LGCO01000241.1
2534; Streptomyces rimosus subsp. rimosus strain NRRL WC-3869
P248contig50.1, whole genome shotgun sequence; 925315417;
LGCQ01000244.1
2535; Streptomyces rimosus subsp. rimosus strain NRRL WC-3869
P248contig20.1, whole genome shotgun sequence; 925322461;
LGCQ01000113.1
2536; Streptomyces rimosus subsp. rimosus strain NRRL WC-3898
P259contig86.1, whole genome shotgun sequence; 927279089;
BRHa_1005676, whole genome NZ_LGCU01000353.1
2537; Streptomyces rimosus subsp. pseudoverticillatus strain
NRRL WC-3896 genome shotgun P270contig8.1, whole genome
shotgun sequence; 927292684; NZ_LGCV01000415.1
2538; Streptomyces rimosus subsp. pseudoverticillatus strain
NRRL WC-3896 P270contig51.1, whole genome shotgun sequence;
927292651; NZ_LGCV01000382.1
2539; Streptomyces sp. NRRL F-5755 P309contig7.1, whole
genome shotgun sequence; 926371541; NZ_LGCW01000295.1
2540; Streptomyces sp. NRRL F-5755 P309contig50.1, whole
genome shotgun sequence; 926371520; NZ_LGCW01000274.1
2541; Streptomyces sp. NRRL F-5755 P309contig48.1, whole
genome shotgun sequence; 926371517; NZ_LGCW01000271.1
2542; Streptomyces sp. NRRL F-6492 P446contig3.1, whole
genome shotgun sequence; 926315769; NZ_LGEG01000211.1
2543; Streptomyces sp. XY332 P409contig34.1, whole genome
shotgun sequence; 927093145; NZ_LGHN01000166.1
2544; Novosphingobium sp. ST904 contig_104, whole genome
shotgun sequence; 935540718; NZ_LGJH01000063.1
2545; Actinobacteria bacterium OK006 ctg96, whole genome
shotgun sequence; 930491003; NZ_LJCU01000287.1
2546; Actinobacteria bacterium OK074 ctg60, whole genome
shotgun sequence; 930473294; NZ_LJCV01000275.1
2547; Betaproteobacteria bacterium SG8_39_WOR_8-12_2589,
whole genome shotgun sequence; 931421682; LJTQ01000030.1
2548; Candidate division BRC1 bacterium SM23_51 WORSMTZ_
10094, whole genome shotgun sequence; 931536013; LJUL01000022.1
2549; Bacillus vietnamensis strain UCD-SED5 scaffold_15, whole
genome shotgun sequence; 933903534; LIXZ01000017.1
2550; Xanthomonas arboricola strain CITA 44 CITA_44_contig_26,
whole genome shotgun sequence; 937505789; NZ_LJGM01000026.1
2551; Xanthomonas sp. Mitacek01 contig_17, whole genome
shotgun sequence; 941965142; NZ_LKIT01000002.1
2552; Erythrobacteraceae bacterium HL-111 ITZY_scaf_51,
whole genome shotgun sequence; 938259025; LJSW01000006.1
2553; Halomonas sp. HL-93 ITZY_scaf_415, whole genome
shotgun sequence; 938285459; LJST01000237.1
2554; Paenibacillus sp. Soil724D2 contig_11, whole genome
shotgun sequence; 946400391; LMRY01000003.1
2555; Leucobacter sp. G161 contig50, whole genome shotgun
sequence; 970293907; LOHP01000076.1
2556; Streptomyces silvensis strain ATCC 53525 53525_Assembly_
Contig_22, whole genome shotgun sequence; 970361514;
LOCL01000028.1
2557; Streptococcus pneumoniae 2071004 gspj3.contig.3,
whole genome shotgun sequence; 421236283; NZ_ALBJ01000004.1
2558; Streptococcus pneumoniae 70585, complete genome;
225857809; NC_012468.1
2559; Bacillus cereus R309803 chromosome, whole genome
shotgun sequence; 238801472; NZ_CM000720.1
2560; Bacillus cereus AH1271 chromosome, whole genome
shotgun sequence; 238801491; NZ_CM000739.1
2561; Bacillus thuringiensis serovar andalousiensis BGSC 4AW1
chromosome, whole genome shotgun sequence; 238801506;
NZ_CM000754.1
2562; Bacillus cereus VD115 supercont1.1, whole genome
shotgun sequence; 423614674; NZ_JH792165.1
2563; Bacillus cereus Rock4-18 chromosome, whole genome
shotgun sequence; 238801487; NZ_CM000735.1
2564; Bacillus cereus Rock1-3 chromosome, whole genome
shotgun sequence; 238801480; NZ_CM000728.1
2565; Bacillus cereus Rock3-29 chromosome, whole genome
shotgun sequence; 238801483; NZ_CM000731.1
2566; Bacillus cereus VD148 supercont1.1, whole genome shotgun
sequence; 423621402; NZ_JH792156.1
2567; Bacillus thuringiensis MC28, complete genome; 407703236;
NC_018693.1
2568; Bacillus cereus BAG5X2-1 supercont1.1, whole
genome shotgun sequence; 423456860; NZ_JH791975.1
2569; Bacillus cereus BAG3X2-1 supercont1.1, whole genome
shotgun sequence; 423416528; NZ_JH791923.1
2570; Bacillus cereus BAG1X1-3 supercont1.1, whole genome
shotgun sequence; 423388152; NZ_JH792182.1
2571; Escherichia coli KTE150 acwoI-supercont1.4, whole
genome shotgun sequence; 433109554; NZ_ANYF01000004.1
2572; Bacillus cereus NVH0597-99 gcontig2_1106483384196,
whole genome shotgun sequence; 196038187; NZ_ABDK02000003.1
2573; Bacillus cereus AH621 chromosome, whole genome
shotgun sequence; 238801471; NZ_CM000719.1
2574; Bacillus cereus AH603 chromosome, whole genome
shotgun sequence; 238801489; NZ_CM000737.1
2575; Bacillus cereus VD142 actaa-supercont2.2, whole
genome shotgun sequence; 514340871; NZ_KE150045.1
2576; Bacillus cereus BAG6O-2 supercont1.1, whole genome
shotgun sequence; 423468694; NZ_JH804628.1
2577; Bacillus cereus BtB2-4 supercont1.1, whole genome
shotgun sequence; 423485377; NZ_JH804642.1
2578; Bacillus cereus HuA2-1 supercont1.1, whole genome
shotgun sequence; 423508503; NZ_JH804672.1
2579; Bacillus cereus HuA4-10 supercont1.1, whole genome
shotgun sequence; 423520617; NZ_JH792148.1
2580; Bacillus cereus MC67 supercont1.2, whole genome
shotgun sequence; 423557538; NZ_JH792114.1
2581; Bacillus cereus VD078 supercont1.1, whole genome
shotgun sequence; 423597198; NZ_JH792251.1
2582; Bacillus cereus VD107 supercont1.1, whole genome
shotgun sequence; 423609285; NZ_JH792232.1
2583; Bacillus mycoides DSM 2048 chromosome, whole genome
shotgun sequence; 238801494; NZ_CM000742.1
2584; Bacillus cereus VDM034 supercont1.1, whole genome
shotgun sequence; 423666303; NZ_JH791809.1
2585; Bacillus cereus BAG5X1-1 supercont1.1, whole genome
shotgun sequence; 423451256; NZ_JH791996.1
2586; Enterococcus faecalis ATCC 29212 contig24, whole
genome shotgun sequence; 401673929; ALOD01000024.1
2587; Enterococcus faecalis TX1341 Scfld578, whole genome
shotgun sequence; 422736691; NZ_GL457197.1
2588; Clostridium butyricum 60E.3 actYk-supercont1.1, whole
genome shotgun sequence; 488644557; NZ_KB851128.1
2589; Rhodobacter sphaeroides WS8N chromosome chrI, whole
genome shotgun sequence; 332561612; NZ_CM001161.1
2590; Microcystis aeruginosa PCC 9807, whole genome
shotgun sequence; 425454132; NZ_HE973326.1
2591; Brevundimonas diminuta ATCC 11568 BDIM_scaffold00005,
whole genome shotgun sequence; 329889017; NZ_GL883086.1
2592; Brevundimonas diminuta 470-4 Scfld7, whole genome
shotgun sequence; 444405902; NZ_KB291784.1
2593; Bacillus mycoides Rock1-4 chromosome, whole genome
shotgun sequence; 238801495; NZ_CM000743.1
2594; Clostridium butyricum 5521 gcontig_1106103650482, whole
genome shotgun sequence; 182420360; NZ_ABDT01000120.2
2595; Xanthomonas citri pv. mangiferaeindicae LMG 941, whole
genome shotgun sequence; 381169556; NZ_CAHO01000002.1
2596; Xanthomonas citri pv. mangiferaeindicae LMG 941, whole
genome shotgun sequence; 381171950; NZ_CAHO01000029.1
2597; Methylosinus trichosporium OB3b MettrDRAFT_Contig106_C,
whole genome shotgun sequence; 639846426; NZ_ADVE02000001.1
2598; Streptomyces clavuligerus ATCC 27064 supercont1.55,
whole genome shotgun sequence; 254392242; NZ_DS570678.1
2599; Streptomyces rimosus subsp. rimosus strain NRRL WC-3909
P217contig95.1, whole genome shotgun sequence; 925286515;
LGCO01000284.1
2600; Streptomyces rimosus subsp. rimosus strain NRRL WC-3909
P217contig56.1, whole genome shotgun sequence; 925291008;
LGCO01000241.1
2601; Streptomyces viridochromogenes DSM 40736 supercont1.1,
whole genome shotgun sequence; 224581107; NZ_GG657757.1
2602; Streptomyces viridochromogenes DSM 40736 supercont1.1,
whole genome shotgun sequence; 224581107; NZ_GG657757.1
2603; Streptomyces viridochromogenes Tue57 Seq127, whole
genome shotgun sequence; 443625867; NZ_AMLP01000127.1
2604; Methanobacterium formicicum DSM 3637 Contig04, whole
genome shotgun sequence; 408381849; NZ_AMPO01000004.1
2605; Burkholderia pseudomallei MSHR435 Y033. Contig530,
whole genome shotgun sequence; 715120018; JRFP01000024.1
2606; Burkholderia mallei GB8 horse 4 contig_394, whole
genome shotgun sequence; 67639376; NZ_AAHO01000116.1
2607; Sphingobium yanoikuyae ATCC 51230 supercont1.1,
whole genome shotgun sequence; 427407324; NZ_H4992904.1
2608; Sphingobium yanoikuyae ATCC 51230 supercont1.1,
whole genome shotgun sequence; 427407324; NZ_JH992904.1
2609; Sphingobium yanoikuyae ATCC 51230 supercont1.1,
whole genome shotgun sequence; 427407324; NZ_JH992904.1
2610; Burkholderia pseudomallei MSHR1043 seq0003, whole
genome shotgun sequence; 469643984; AOGU01000003.1
2611; Burkholderia pseudomallei strain BEF DP42. Contig323,
whole genome shotgun sequence; 686949962; JPNR01000131.1
2612; Burkholderia pseudomallei S13 scf_1041068450778, whole
shotgun sequence; 254197184; NZ_CH899773.1
genome 2613; Burkholderia pseudomallei 1026a Contig0036, whole
genome shotgun sequence; 385360120; AHJA01000036.1
2614; Burkholderia pseudomallei 305 g_contig_BUA. Contig1097,
whole genome shotgun sequence; 134282186; NZ_AAYX01000011.1
2615; Burkholderia pseudomallei 576 BUC. Contig184, whole
genome shotgun sequence; 217421258; NZ_ACCE01000004.1
2616; [Eubacterium] cellulosolvens 6 chromosome, whole genome
shotgun sequence; 389575461; NZ_CM001487.1
2617; Amycolatopsis azurea DSM 43854 contig60, whole genome
shotgun sequence; 451338568; NZ_ANMG01000060.1
2618; Xanthomonas axonopodis pv. malvacearum str. GSPB1386
1386_Scaffold6, whole genome shotgun sequence; 418516056;
NZ_AHIB01000006.1
2619; Xanthomonas citti pv. punicae str. LMG 859, whole genome
shotgun sequence; 390991205; NZ_CAGJ01000031.1
2620; Bacillus pseudomycoides DSM 12442 chromosome, whole
genome shotgun sequence; 238801497; NZ_CM000745.1
2621; Mesorhizobium amorphae CCNWGS0123 contig00204, whole
genome shotgun sequence; 357028583; NZ_AGSN01000187.1
2622; Xanthomonas gardneri ATCC 19865 XANTHO7DRAF_
Contig52, whole genome shotgun sequence; 325923334;
NZ_AEQX01000392.1
2623; Xenococcus sp. PCC 7305 scaffold_00124, whole genome
shotgun sequence; 443325429; NZ_ALVZ01000124.1
2624; Leptolyngbya sp. PCC 7375 Lepto7375DRAFT_LPA.5,
whole genome shotgun sequence; 427415532; NZ_M993797.1
2625; Streptomyces auratus AGR0001 Scaffold1, whole genome
shotgun sequence; 398790069; NZ_JH725387.1
2626; Paenibacillus dendritiformis C454 PDENDC1000064, whole
genome shotgun sequence; 374605177; NZ_AHKH01000064.1
2627; Halosimplex carlsbadense 2-9-1 contig_4, whole genome
shotgun sequence; 448406329; NZ_AOIU01000004.1
2628; Rothia aeria F0474 contig00003, whole genome shotgun
sequence; 383809261; NZ_AJJQ01000036.1
2629; Paenibacillus lactis 154 ctg179, whole genome shotgun
sequence; 354585485; NZ_AGIP01000020.1
2630; Fictibacillus macauensis ZFHKF-1 Contig20, whole genome
shotgun sequence; 392955666; NZ_AKKV01000020.1
2631; Marine gamma proteobacterium HTCC2148 scf_1106774214169,
whole genome shotgun sequence; 254480798; NZ_DS999224.1
2632; Paenibacillus sp. Aloe-11 GW8_15, whole genome
shotgun sequence; 375307420; NZ_JH601049.1
2633; Rhodanobacter denitrificans strain 116-2 contig032, whole
genome shotgun sequence; 389798210; NZ_AJXV01000032.1
2634; Frankia saprophytica strain CN3 FrCN3DRAFT_FCB.2, whole
genome shotgun sequence; 652876473; NZ_KI912267.1
2635; Caulobacter sp. AP07 PMI01_contig_53.53, whole genome
shotgun sequence; 399069941; NZ_AKKF01000033.1
2636; Novosphingobium sp. AP12 PMI02_contig_78.78, whole
genome shotgun sequence; 399058618; NZ_AKKE01000021.1
2637; Sphingobium sp. AP49 PMI04_contig490.490, whole
genome shotgun sequence; 398386476; NZ_AJVL01000086.1
2638; Desulfosporosinus youngiae DSM 17734 chromosome,
whole genome shotgun sequence; 374578721; NZ_CM001441.1
2639; Moorea producens 3L scf52054, whole genome shotgun
sequence; 332710503; NZ_GL890955.1
2640; Pedobacter sp. BAL39 1103467000500, whole genome
shotgun sequence; 149277003; NZ_ABCM01000004.1
2641; Sulfurovum sp. AR contig00449, whole genome shotgun
sequence; 386284588; NZ_AJLE01000006.1
2642; Mucilaginibacter paludis DSM 18603 chromosome, whole
genome shotgun sequence; 373951708; NZ_CM001403.1
2643; Mucilaginibacter paludis DSM 18603 chromosome, whole
genome shotgun sequence; 373951708; NZ_CM001403.1
2644; Magnetospirillum caucaseum strain SO-1 contig00006, whole
genome shotgun sequence; 458904467; NZ_AONQ01000006.1
2645; Sphingomonas sp. LH128 Contig3, whole genome
shotgun sequence; 402821166; NZ_ALVC01000003.1
2646; Sphingomonas sp. LH128 Contig8, whole genome
shotgun sequence; 402821307; NZ_ALVC01000008.1
2647; Novosphingobium sp. Rr 2-17 contig98, whole genome
shotgun sequence; 393773868; NZ_AKFJ01000097.1
2648; Streptomyces sp. AA4 supercont1.3, whole genome
shotgun sequence; 224581098; NZ_GG657748.1
2649; Moorea producens 3L scf52052, whole genome shotgun
sequence; 332710285; NZ_GL890953.1
2650; Cecembia lonarensis LW9 contig000133, whole genome
shotgun sequence; 406663945; NZ_AMGM01000133.1
2651; Actinomyces sp. oral taxon 848 str. F0332 Scfld0, whole
genome shotgun sequence; 260447107; NZ_GG703879.1
2652; Actinomyces sp. oral taxon 848 str. F0332 Scfld0, whole
genome shotgun sequence; 260447107; NZ_GG703879.1
2653; Streptomyces ipomoeae 91-03 gcontig_1108499710267, whole
genome shotgun sequence; 429195484; NZ_AEJC01000118.1
2654; Frankia sp. QA3 chromosome, whole genome
shotgun sequence; 392941286; NZ_CM001489.1
2655; Fischerella sp. JSC-11 ctg112, whole genome
shotgun sequence; 354566316; NZ_AGIZ01000005.1
2656; Rhodobacter sp. AKP1 contig19, whole genome
shotgun sequence; 429208285; NZ_ANFS01000019.1
2657; Sphingomonas sp. SKA58 scf_1100007010440, whole
genome shotgun sequence; 211594417; NZ_CH959308.1
2658; Rubfivivax benzoatilyticus JA2 = ATCC BAA-35 strain
JA2 contig_155, whole genome shotgun sequence; 332527785;
NZ_AEWG01000155.1
2659; Streptomyces clavuligerus ATCC 27064 plasmid pSCL3,
whole genome shotgun sequence; 326336949; NZ_CM001018.1
2660; Streptomyces chartreusis NRRL 12338 12338_Doro1_scaffold19,
whole genome shotgun sequence; 381200190; NZ_JH164855.1
2661; Candidatus Odyssella thessalonicensis L13 HMO_scaffold00016,
whole genome shotgun sequence; 343957487; NZ_AEWF01000005.1
2662; Candidatus Odyssella thessalonicensis L13 HMO_scaffold00016,
whole genome shotgun sequence; 343957487; NZ_AEWF01000005.1
2663; Sphingobium yanoikuyae XLDN2-5 contig000022, whole
genome shotgun sequence; 378759068; NZ_AFXE01000022.1
2664; Sphingobium yanoikuyae XLDN2-5 contig000029, whole
genome shotgun sequence; 378759075; NZ_AFXE01000029.1
2665; Paenibacillus peofiae KCTC 3763 contig9, whole
genome shotgun sequence; 389822526; NZ_AGFX01000048.1
2666; Citromicrobium sp. JLT1363 contig00009, whole
genome shotgun sequence; 341575924; NZ_AEUE01000009.1
2667; [Pseudomonas] geniculata N1 contig35, whole genome
shotgun sequence; 921165904; NZ_AJLO02000014.1
2668; Pseudomonas extremaustralis 14-3 substr. 14-3b strain
14-3 contig00001, whole genome shotgun sequence;
394743069; NZ_AHIP01000001.1
2669; Streptomyces sp. S4, whole genome shotgun sequence;
358468594; NZ_FR873693.1
2670; Streptomyces sp. S4, whole genome shotgun sequence;
358468601; NZ_FR873700.1
2671; Bacillus timonensis strain MM10403188, whole genome
shotgun sequence; 403048279; NZ_HE610988.1
2672; Lunatimonas lonarensis strain AK24 S14_contig_18, whole
genome shotgun sequence; 499123840; NZ_AQHR01000021.1
2673; Mesorhizobium loti MAFF303099 DNA, complete
genome; 57165207; NC_002678.2
2674; Legionella pneumophila subsp. pneumophila ATCC
43290, complete genome; 378775961; NC_016811.1
2675; Xanthomonas axonopodis pv. citfi str. 306, complete
genome; 21240774; NC_003919.1
2676; Thermobifida fusca YX, complete genome; 72160406;
NC_007333.1
2677; Rhodobacter sphaeroides 2.4.1 chromosome 1, whole
genome shotgun sequence; 482849861; NZ_AKBU01000001.1
2678; Rhodospirillum rubrum F11, complete genome;
386348020; NC_017584.1
2679; Rhodospirillum rubrum F11, complete genome;
386348020; NC_017584.1
2680; Rhodospirillum rubrum F11, complete genome;
386348020; NC_017584.1
2681; Hahella chejuensis KCTC 2396, complete genome;
83642913; NC_007645.1
2682; Frankia sp. Thr ThrDRAFT_scaffold_48.49, whole
genome shotgun sequence; 602261491; JENI01000049.1
2683; Frankia sp. Thr ThrDRAFT_scaffold_28.29, whole
genome shotgun sequence; 602262270; JENI01000029.1
2684; Novosphingobium aromaticivorans DSM 12444,
complete genome; 87198026; NC_007794.1
2685; Roseobacter denitfificans OCh 114, complete
genome; 110677421; NC_008209.1
2686; Frankia alni str. ACN14A chromosome, complete
sequence; 111219505; NC_008278.1
2687; Pelobacter propionicus DSM 2379, complete genome;
118578449; NC_008609.1
2688; Psychromonas ingrahamii 37, complete genome;
119943794; NC_008709.1
2689; Rhodobacter sphaeroides ATCC 17029 chromosome 1,
complete sequence; 126460778; NC_009049.1
2690; Burkholdefia pseudomallei 668 chromosome I,
complete sequence; 126438353; NC_009074.1
2691; Rhodobacter sphaeroides ATCC 17025, complete
genome; 146276058; NC_009428.1
2692; Geobacter uraniireducens Rf4, complete genome;
148262085; NC_009483.1
2693; Sulfurovum sp. NBC37-1 genomic DNA, complete
genome; 152991597; NC_009663.1
2694; Acaryochloris marina MBIC11017, complete
genome; 158333233; NC_009925.1
2695; Bacillus weihenstephanensis KBAB4, complete
genome; 163938013; NC_010184.1
2696; Caulobacter sp. K31 plasmid pCAUL01, complete
sequence; 167621728; NC_010335.1
2697; Caulobacter sp. K31, complete genome; 167643973;
NC_010338.1
2698; Candidatus Amoebophilus asiaticus 5a2, complete
genome; 189501470; NC_010830.1
2699; Stenotrophomonas maltophilia R551-3, complete
genome; 194363778; NC_011071.1
2700; Bifidobacterium longum subsp infantis ATCC 15697,
complete genome; 213690928; NC_011593.1
2701; Cyanothece sp. PCC 7425, complete genome; 220905643;
NC_011884.1
2702; Chitinophaga pinensis DSM 2588, complete genome;
256419057; NC_013132.1
2703; Haliangium ochraceum DSM 14365, complete genome;
262193326; NC_013440.1
2704; Rhodothermus marinus DSM 4252, complete genome;
268315578; NC_013501.1
2705; Thermobaculum terrenum ATCC BAA-798 chromosome
1, complete sequence; 269925123; NC_013525.1
2706; Thermobaculum terrenum ATCC BAA-798 chromosome
2, complete sequence; 269838913; NC_013526.1
2707; Thermobaculum terrenum ATCC BAA-798 chromosome
2, complete sequence; 269838913; NC_013526.1
2708; Sphingobium japonicum UT26S DNA, chromosome 1,
complete genome; 294009986; NC_014006.1
2709; Sphingobium japonicum UT26S plasmid pCHQ1 DNA,
complete genome; 294023656; NC_014007.1
2710; Salinibacter ruber M8 chromosome, complete
genome; 294505815; NC_014032.1
2711; Salinibacter ruber M8 chromosome, complete
genome; 294505815; NC_014032.1
2712; Legionella pneumophila 2300/99 Alcoy, complete
genome; 296105497; NC_014125.1
2713; Nocardiopsis dassonvillei subsp. dassonvillei DSM 43111
chromosome 1, complete sequence; 297558985; NC_014210.1
2714; Amycolatopsis mediten-anei S699, complete
genome; 384145136; NC_017186.1
2715; Butyrivibrio proteoclasticus B316 chromosome 1,
complete sequence; 302669374; NC_014387.1
2716; Paenibacillus polymyxa E681, complete genome;
864439741; NC_014483.2
2717; Paenibacillus polymyxa M1 main chromosome,
complete genome; 386038690; NC_017542.1
2718; Leadbetterella byssophila DSM 17132, complete
genome; 312128809; NC_014655.1
2719; Frankia inefficax, complete genome; 312193897;
NC_014666.1
2720; Frankia inefficax, complete genome; 312193897;
NC_014666.1
2721; Burkholderia rhizoxinica HKI 454, complete
genome; 312794749; NC_014722.1
2722; Burkholderia rhizoxinica HKI 454, complete
genome; 312794749; NC_014722.1
2723; Asticcacaulis excentricus CB 48 chromosome 2,
complete sequence; 315499382; NC_014817.1
2724; Teniglobus saanensis SP1PR4, complete genome;
320105246; NC_014963.1
2725; Syntrophobotulus glycolicus DSM 8271, complete
genome; 325288201; NC_015172.1
2726; Methanobacterium lacus strain AL-21, complete
genome; 325957759; NC_015216.1
2727; Marinomonas mediterranea MMB-1, complete
genome; 326793322; NC_014006.1 NC_015276.1
2728; Desulfobacca acetoxidans DSM 11109, complete
genome; 328951746; NC_015388.1
2729; Methylomonas methanica MC09, complete genome;
333981747; NC_015572.1
2730; Methylomonas methanica MC09, complete genome;
333981747;NC_015572.1
2731; Methanobacterium paludis strain SWAN1, complete
genome; 333986242; NC_015574.1
2732; Novosphingobium sp. PP1Y Lpl large plasmid,
complete replicon; 334133217; NC_015579.1
2733; Novosphingobium sp. PP1Y main chromosome,
complete replicon; 334139601; NC_015580.1
2734; Frankia symbiont of Datisca glomerata, complete
genome; 336176139; NC_015656.1
2735; Halopiger xanaduensis SH-6 plasmid pHALXA01,
complete genome; 336251750; NC_015658.1
2736; Mesorhizobium opportunistum WSM2075, complete
genome; 337264537; NC_015675.1
2737; Runella slithyformis DSM 19594, complete genome;
338209545; NC_015703.1
2738; Runella slithyformis DSM 19594, complete genome;
338209545; NC_015703.1
2739; Roseobacter litoralis Och 149, complete genome;
339501577; NC_015730.1
2740; Streptomyces violaceusniger Tu 4113 plasmid pSTRVI01,
complete sequence; 345007457; NC_015951.1
2741; Rhodothennus marinus SG0.5JP17-172, complete genome;
345301888; NC_015966.1
2742; Sphingobium sp. SYK-6 DNA, complete genome;
347526385; NC_015976.1
2743; Sphingobium sp. SYK-6 DNA, complete genome;
347526385; NC_015976.1
2744; Chloracidobacterium thermophilum B chromosome 1,
complete sequence; 347753732; NC_016024.1
2745; Kitasatospora setae KM-6054 DNA, complete genome;
357386972; NC_016109.1
2746; Kitasatospora setae KM-6054 DNA, complete genome;
357386972; NC_016109.1
2747; Streptomyces cattleya str. NRRL 8057 main chromosome,
complete genome; 357397620; NC_016111.1
2748; Desulfosporosinus orientis DSM 765, complete genome;
374992780; NC_016584.1
2749; Paenibacillus tenae HPL-003, complete genome;
374319880; NC_016641.1
2750; Bacillus megaterium WSH-002, complete genome;
384044176; NC_017138.1
2751; Francisella cf. novicida 3523, complete genome;
387823583; NC_017449.1
2752; Streptococcus salivarius JIM8777 complete genome;
387783149; NC_017595.1
2753; Tistrella mobilis KA081020-065, complete genome;
389875858; NC_017956.1
2754; Tistrella mobilis KA081020-065 plasmid pTM3,
complete sequence; 389874236; NC_017958.1
2755; Legionella pneumophila subsp. pneumophila str. Lorraine
chromosome, complete genome; 397662556; NC_018139.1
2756; Nocardiopsis alba ATCC BAA-2165, complete
genome; 403507510; NC_018524.1
2757; Streptomyces venezuelae ATCC 10712 complete
genome; 408675720; NC_018750.1
2758; Saccharothrix espanaensis DSM 44229 complete
genome; 433601838; NC_019673.1
2759; Nostoc sp. PCC 7107, complete genome;
427705465; NC_019676.1
2760; Rivularia sp. PCC 7116, complete genome;
427733619; NC_019678.1
2761; Rivularia sp. PCC 7116, complete genome;
427733619; NC_019678.1
2762; Synechococcus sp. PCC 6312, complete genome;
427711179; NC_019680.1
2763; Nostoc sp. PCC 7524, complete genome;
427727289; NC_019684.1
2764; Calothrix sp. PCC 6303, complete genome;
428296779; NC_019751.1
2765; Crinalium epipsammum PCC 9333, complete
genome; 428303693; NC_019753.1
2766; Cylindrospermum stagnale PCC 7417, complete
genome; 434402184; NC_019757.1
2767; Thermobacillus composti KWC4, complete genome;
430748349; NC_019897.1
2768; Mesorhizobium australicum WSM2073, complete
genome; 433771415; NC_019973.1
2769; Rhodanobacter denitrificans strain 2APBS1, complete
genome; 469816339; NC_020541.1
2770; Bacillus sp. 1NLA3E, complete genome; 488570484;
NC_021171.1
2771; Bacillus sp. 1NLA3E, complete genome; 488570484;
NC_021171.1
2772; Burkholdefia thailandensis MSMB121 chromosome 1,
complete sequence; 488601775; NC_021173.1
2773; Streptomyces davawensis strain JCM 4913 complete
genome; 471319476; NC_020504.1
2774; Streptomyces davawensis strain JCM 4913 complete
genome; 471319476; NC_020504.1
2775; Desulfotomaculum acetoxidans DSM 771, complete
genome; 258513366; NC_013216.1
2776; Desulfotomaculum acetoxidans DSM 771, complete
genome; 258513366; NC_013216.1
2777; Actinosynnema mirum DSM 43827, complete genome;
256374160; NC_013093.1
2778; Actinosynnema mirum DSM 43827, complete genome;
256374160; NC_013093.1
2779; Rhodobacter sphaeroides KD131 chromosome 1,
complete sequence; 221638099; NC_011963.1
2780; Bacillus cereus BAG2O-3 acfXF-supercont1.1, whole
genome shotgun sequence; 507017505; NZ_KB976530.1
2781; Bacillus cereus HuA2-9 acqVt-supercont1.1, whole
genome shotgun sequence; 507020427; NZ_KB976152.1
2782; Bacillus cereus HuA3-9 acqVv-supercont1.4, whole
genome shotgun sequence; 507024338; NZ_KB976146.1
2783; Bacillus cereus VD118 acrHo-supercont1.9, whole
genome shotgun sequence; 507035131; NZ_KB976800.1
2784; Bacillus cereus VD131 acrHi-supercont1.9, whole
genome shotgun sequence; 507037581; NZ_KB976660.1
2785; Bacillus cereus VD136 acrHc-supercont1.1, whole
genome shotgun sequence; 507041177; NZ_KB976717.1
2786; Bacillus cereus VDM019 achrj-supercont1.2, whole
genome shotgun sequence; 507056808; NZ_KB976199.1
2787; Bacillus cereus VDM053 acrGS-supercont1.7, whole
genome shotgun sequence; 507060152; NZ_KB976714.1
2788; Bacillus cereus VDM006 acrHb-supercont1.1, whole
genome shotgun sequence; 507060269; NZ_KB976864.1
2789; Bacillus cereus VDM021 acrHe-supercont1.1, whole
genome shotgun sequence; 507061629; NZ_KB976905.1
2790; Thermobifida fusca TM51 contig028, whole genome
shotgun sequence; 510814910; NZ_AOSG01000028.1
2791; Halomonas anticafiensis FP35 = DSM 16096 strain FP35
Scaffold1, whole genome shotgun sequence; 514429123;
NZ_KE332377.1
2792; Halomonas anticafiensis FP35 = DSM 16096 strain FP35
Scaffold1, whole genome shotgun sequence; 514429123;
NZ_KE332377.1
2793; Halomonas anticafiensis FP35 = DSM 16096 strain FP35
Scaffold1, whole genome shotgun sequence; 514429123;
NZ_KE332377.1
2794; Streptomyces sp. HPH0547 aczHZ-supercont1.2, whole
genome shotgun sequence; 512676856; NZ_KE150472.1
2795; Acinetobacter gyllenbergii MTCC 11365 contig1, whole
genome shotgun sequence; 514348304; NZ_ASQH01000001.1
2796; Streptomyces aurantiacus JA 4570 Seq63, whole genome
shotgun sequence; 514917321; NZ_AOPZ01000063.1
2797; Streptomyces aurantiacus JA 4570 Seq109, whole
genome shotgun sequence; 514918665; NZ_AOPZ01000109.1
2798; Actinoalloteichus spitiensis RMV-1378 Contig406, whole
genome shotgun sequence; 483112234; NZ_AGVX02000406.1
2799; Paenibacillus polymyxa OSY-DF Contig136, whole
genome shotgun sequence; 484036841; NZ_AIPP01000136.1
2800; Fischerella muscicola SAG 1427-1 = PCC 73103 contig00215,
whole genome shotgun sequence; 484073367; NZ_AJLJ01000207.1
2801; Fischerella muscicola PCC 7414 contig00109, whole
genome shotgun sequence; 484075173; NZ_AJLK01000109.1
2802; Fischerella muscicola PCC 7414 contig00153, whole
genome shotgun sequence; 484075372; NZ_AJLK01000153.1
2803; Fischerella thermalis PCC 7521 contig00099, whole
genome shotgun sequence; 484076371; NZ_AJLL01000098.1
2804; Xanthomonas arboficola pv. juglandis str. NCPPB 1447
contig00105, whole genome shotgun sequence; 484083029;
NZ_AJTL01000105.1
2805; Sphingobium xenophagum QYY contig015, whole
genome shotgun sequence; 484272664; NZ_AKM01000015.1
2806; Pedobacter arcticus A12 Scaffold2, whole genome
shotgun sequence; 484345004; NZ_JH947126.1
2807; Leptolyngbya boryana PCC 6306 LepboDRAFT_LPC.1,
whole genome shotgun sequence; 482909028; NZ_KB731324.1
2808; Spirulina subsalsa PCC 9445 Contig210, whole genome
shotgun sequence; 482909235; NZ_JH980292.1
2809; Fischerella sp. PCC 9339 PCC9339DRAFT_scaffold1.1,
whole genome shotgun sequence; 482909394; NZ_JH992898.1
2810; Mastigocladopsis repens PCC 10914 Mas10914DRAFT_
scaffold1.1, whole genome shotgun sequence; 482909462;
NZ_JH992901.1
2811; Methylowccus capsulatus str. Texas = ATCC 19069 strain
Texas contig0129, whole genome shotgun sequence;
483090991; NZ_AMCE01000064.1
2812; Lactococcus garvieae Tac2 Tac2Contig_33, whole genome
shotgun sequence; 483258918; NZ_AMFE01000033.1
2813; Paenisporosarcina sp. TG-14 111.TG14.1_1, whole
genome shotgun sequence; 483299154; NZ_AMGD01000001.1
2814; Paenibacillus sp. ICGEB2008 Contig_7, whole genome
shotgun sequence; 483624383; NZ_AMQU01000007.1
2815; Amphibacillus jilinensis Y1 Scaffold2, whole genome
shotgun sequence; 483992405; NZ_JH976435.1
2816; Alpha proteobacterium LLX12A LLX12A_contig00014,
whole genome shotgun sequence; 483996931; NZ_AMYX01000014.1
2817; Alpha proteobacterium LLX12A LLX12A_contig00026,
whole genome shotgun sequence; 483996974; NZ_AMYX01000026.1
2818; Alpha proteobacterium LLX12A LLX12A_contig00084,
whole genome shotgun sequence; 483997176; NZ_AMYX01000084.1
2819; Alpha proteobacterium LA1A L41A_contig00002, whole
genome shotgun sequence; 483997957; NZ_AMYY01000002.1
2820; Nocardiopsis alba DSM 43377 contig 10, whole genome
shotgun sequence; 484007121; NZ_ANAC01000010.1
2821; Nocardiopsis sp. TP-A0876 strain NBRC 110039, whole
genome shotgun sequence; 754924215; NZ_BAZE01000001.1
2822; Nocardiopsis halophila DSM 44494 contig_138, whole
genome shotgun sequence; 484007841; NZ_ANAD01000138.1
2823; Nocardiopsis halophila DSM 44494 contig_138, whole
genome shotgun sequence; 484007841; NZ_ANAD01000138.1
2824; Nocardiopsis halophila DSM 44494 contig_197, whole
genome shotgun sequence; 484008051; NZ_ANAD01000197.1
2825; Nocardiopsis baichengensis YIM 90130 Scaffold15_1, whole
genome shotgun sequence; 484012558; NZ_ANAS01000033.1
2826; Nocardiopsis halotolerans DSM 44410 contig_26, whole
genome shotgun sequence; 484015294; NZ_ANAX01000026.1
2827; Nocardiopsis kunsanensis DSM 44524 contig_3, whole
genome shotgun sequence; 484016825; NZ_ANAY01000003.1
2828; Nocardiopsis kunsanensis DSM 44524 contig_16, whole
genome shotgun sequence; 484016872; NZ_ANAY01000016.1
2829; Nocardiopsis potens DSM 45234 contig_25, whole
genome shotgun sequence; 484017897; NZ_ANBB01000025.1
2830; Nocardiopsis lucentensis DSM 44048 contig_935, whole
genome shotgun sequence; 484021665; NZ_ANBC01000935.1
2831; Nocardiopsis alkaliphila YIM 80379 contig_111, whole
genome shotgun sequence; 484022237; NZ_ANBD01000111.1
2832; Nocardiopsis sauna YIM 90010 contig_87, whole genome
shotgun sequence; 484023389; NZ_ANBF01000087.1
2833; Nocardiopsis sauna YIM 90010 contig_204, whole genome
shotgun sequence; 484023808; NZ_ANBF01000204.1
2834; Nocardiopsis chromatogenes YIM 90109 contig_59, whole
genome shotgun sequence; 484026076; NZ_ANBH01000059.1
2835; Porphyrobacter sp. AAP82 Contig35, whole genome
shotgun sequence; 484033307; NZ_ANFX01000035.1
2836; Blastomonas sp. AAP53 Contig8, whole genome shotgun
sequence; 484033611; NZ_ANFZ01000008.1
2837; Blastomonas sp. AAP53 Contig14, whole genome shotgun
sequence; 484033631; NZ_ANFZ01000014.1
2838; Paenibacillus sp. PAMC 26794 5104_29, whole genome
shotgun sequence; 484070054; NZ_ANHX01000029.1
2839; Oscillatoria sp. PCC 10802 Osc10802DRAFT_Contig7.7,
whole genome shotgun sequence; 484104632; NZ_KB235948.1
2840; Oscillatoria sp. PCC 10802 Osc10802DRAFT_Contig7.7,
whole genome shotgun sequence; 484104632; NZ_KB235948.1
2841; Clostridium botulinum CB11/1-1 CB_contig00105, whole
genome shotgun sequence; 484141779; NZ_AORM01000006.1
2842; Actinopolyspora halophila DSM 43834 ActhaDRAFT_
contig1.1_C, whole genome shotgun sequence; 484203522;
NZ_AQUI01000002.1
2843; Asticcacaulis benevestitus DSM 16100 = ATCC BAA-896
strain DSM 16100 B060DRAFT_scaffold_12.13_C, whole genome
shotgun sequence; 484226753; NZ_AQWM01000013.1
2844; Asticcacaulis benevestitus DSM 16100 = ATCC BAA-896
strain DSM 16100 B060DRAFT_scaffold_31.32_C, whole genome
shotgun sequence; 484226810; NZ_AQWM01000032.1
2845; Streptomyces sp. FxanaC1 B074DRAFT_scaffold_1.2_C,
whole genome shotgun sequence; 484227180; NZ_AQW001000002.1
2846; Streptomyces sp. FxanaC1 B074DRAFT_scaffold_7.8_C,
whole genome shotgun sequence; 484227195; NZ_AQW001000008.1
2847; Smaragdicoccus niigatensis DSM 44881 = NBRC 103563
strain DSM 44881 F600DRAFT_scaffold00011.11_C, whole genome
shotgun sequence; 484234624; NZ_AQXZ01000009.1
2848; Sphingomonas melonis DAPP-PG 224 Sphme3DRAFT_
scaffold1.1, whole genome shotgun sequence; 482984722;
NZ_KB900605.1
2849; Verrucomicrobium sp. 3C A37ADRAFT_scaffold1.1,
whole genome shotgun sequence; 483219562; NZ_KB901875.1
2850; Verrucomicrobium sp. 3C A37ADRAFT_scaffold1.1,
whole genome shotgun sequence; 483219562; NZ_KB901875.1
2851; Bradyrhizobium sp. WSM2793 A3ASDRAFT_scaffold
genome shotgun sequence; 483314733; NZ_KB902785.1
2852; Streptomyces vitaminophilus DSM 41686 A3IGDRAFT_
scaffold_10.11, whole genome shotgun sequence; 483682977;
NZ_KB904636.1
2853; Ancylobacter sp. FA202 A3M1DRAFT_scaffold1.1, whole
genome shotgun sequence; 483720774; NZ_KB904818.1
2854; Filamentous cyanobactenum ESFC-1 A3MYDRAFT_
scaffold1.1, whole genome shotgun sequence; 483724571;
NZ_KB904821.1
2855; Streptomyces sp. CcaIMP-8W B053DRAFT_scaffold_17.18,
whole genome shotgun sequence; 483961830; NZ_KB890924.1
2856; Streptomyces sp. ScaeMP-e10 B061DRAFT_scaffold_01,
whole genome shotgun sequence; 483967534; NZ_KB891296.1
2857; Streptomyces sp. KhCrAH-244 B069DRAFT_scaffold_11.12,
whole genome shotgun sequence; 483969755; NZ_KB891596.1
2858; Streptomyces sp. HmicA12 B072DRAFT_scaffold_19.20,
whole genome shotgun sequence; 483972948; NZ_KB891808.1
2859; Streptomyces sp. MspMP-M5 B073DRAFT_scaffold 27.28,
whole genome shotgun sequence; 483974021; NZ_KB891893.1
2860; Arthrobacter sp. 161MFSha2.1 C567DRAFT_scaffold00006.6,
whole genome shotgun sequence; 484021228; NZ_KB895788.1
2861; Streptomyces sp. CNY228 D330DRAFT_scaffold00011.11,
whole genome shotgun sequence; 484057944; NZ_KB898231.1
2862; Streptomyces sp. CNB091 D581DRAFT_scaffold00010.10,
whole genome shotgun sequence; 484070161; NZ_KB898999.1
2863; Sphingobium xenophagum NBRC 107872, whole genome
shotgun sequence; 483527356; NZ_BARE01000016.1
2864; Streptomyces sp. TOR3209 Contig612, whole genome shotgun
sequence; 484867900; NZ_AGNH01000612.1
2865; Streptomyces sp. TOR3209 Contig613, whole genome shotgun
sequence; 484867902; NZ_AGNH01000613.1
2866; Stenotrophomonas maltophilia RR-10 STMALcontig40,
whole genome shotgun sequence; 484978121; NZ_AGRB01000040.1
2867; Bacillus oceanisediminis 2691 contig2644, whole genome
shotgun sequence; 485048843; NZ_ALEG01000067.1
2868; Calothrix sp. PCC 7103 Cal7103DRAFT_CPM.6, whole
genome shotgun 24.25, whole sequence; 485067373; NZ_KB217478.1
2869; Pseudanabaena sp. PCC 6802 Pse6802_scaffold_5, whole
genome shotgun sequence; 485067426; NZ_KB235914.1
2870; Actinomadura atramentaiia DSM 43919 strain SF2197
G339DRAFT_scaffold00002.2, whole genome shotgun sequence;
485090585; NZ_KB907209.1
2871; Novispirillum itersonii subsp. itersonii ATCC 12639
G365DRAFT_scaffold00001.1, whole genome shotgun sequence;
485091510; NZ_KB907337.1
2872; Novispirillum itersonii subsp. itersonii ATCC 12639
G365DRAFT_scaffold00001.1, whole genome shotgun sequence;
485091510; NZ_KB907337.1
2873; Paenibacillus polymyxa ATCC 842 PPt02_scaffold1,
whole genome shotgun sequence; 485269841; NZ_GL905390.1
2874; Actinopolyspora mortivallis DSM 44261 strain HS-1
ActmoDRAFT_scaffold1.1, whole genome shotgun sequence;
486324513; NZ_KB913024.1
2875; Mesorhizobium loti NZP2037 Meslo3DRAFT_scaffold1.1,
whole genome shotgun sequence; 486325193; NZ_KB913026.1
2876; Paenibacillus sp. HW567 B212DRAFT_scaffold1.1, whole
genome shotgun sequence; 486346141; NZ_KB910518.1
2877; Bacillus sp. 123MFChir2 H280DRAFT_scaffold00030.30,
whole genome shotgun sequence; 487368297; NZ_KB910953.1
2878; Streptomyces canus 299MFChir4.1 H293DRAFT_
scaffold00032.32, whole genome shotgun sequence; 487385965;
NZ_KB911613.1
2879; Kribbella catacumbae DSM 19601 A3ESDRAFT_scaffold_
7.8_C, whole genome shotgun sequence; 484207511;
NZ_AQUZ01000008.1
2880; Paenibacillus riograndensis SBR5 Contig78, whole genome
shotgun sequence; 485470216; NZ_A
2881; Lamprocystis purpurea DSM 4197 A39ODRAFT_scaffold_0.1,
whole genome shotgun sequence; 483254584; NZ_KB902362.1
2882; Nonomumea coxensis DSM 45129 A3G7DRAFT_scaffold_4.5,
whole genome shotgun sequence; 483454700; NZ_KB903974.1
2883; Streptomyces scabrisporus DSM 41855 A3ICDRAFT_scaffold_01,
whole genome shotgun sequence; 483624586; NZ_KB889561.1
2884; Amycolatopsis alba DSM 44262 scaffold1, whole genome shotgun
sequence; 486330103; NZ_KB913032.1
2885; Amycolatopsis benzoatilytica AK 16/65 AmybeDRAFT_scaffold1.1,
whole genome shotgun sequence; 486399859; NZ_KB912942.1
2886; Amycolatopsis nigrescens CSC17Ta-90 AmyniDRAFT_Contig68.1_
C, whole genome shotgun sequence; 487404592; NZ_ARVW01000001.1
2887; Amycolatopsis nigrescens CSC17Ta-90 AmyniDRAFT_Contig68.1_
C, whole genome shotgun sequence; 487404592; NZ_ARVW01000001.1
2888; Amycolatopsis nigrescens CSC17Ta-90 AmyniDRAFT_Contig68.1_
C, whole genome shotgun sequence; 487404592; NZ_ARVW01000001.1
2889; Reyranella massiliensis 521, whole genome shotgun
sequence; 484038067; NZ_HE997181.1
2890; Acidobacteriaceae bacterium KBS 83 G002DRAFT_
scaffold00007.7, whole genome shotgun sequence; 485076323;
NZ_KB906739.1
2891; Sphingobium lactosutens DS20 contig107, whole genome
shotgun sequence; 544811486; NZ_ATDP01000107.1
2892; Novosphingobium lindaniclasticum LE124 contig147,
whole genome shotgun sequence; 544819688; NZ_ATHL01000147.1
2893; Actinobaculum sp. oral taxon 183 str. F0552 Scaffold15,
whole genome shotgun sequence; 545327527; NZ_KE951412.1
2894; Novosphingobium sp. B-7 scaffold147, whole genome shotgun
sequence; 514419386; NZ_KE148338.1
2895; Sphingomonas-like bacterium B12, whole genome shotgun
sequence; 484113405; NZ_BACX01000237.1
2896; Sphingomonas-like bacterium B12, whole genome shotgun
sequence; 484113491; NZ_BACX01000258.1
2897; Thermoactinomyces vulgaris strain NRRL F-5595 F5595contig15.1,
whole genome shotgun sequence; 929862756; NZ_LGKI01000090.1
2898; Clostridium saccharobutylicum DSM 13864, complete genome;
550916528; NC_022571.1
2899; Butyrivibrio fibrisolvens AB2020 G616DRAFT_scaffold00015.15_
C, whole genome shotgun sequence; 551012921; NZ_ATVZ01000015.1
2900; Butyrivibrio sp. XPD2006 G590DRAFT_scaffold00008.8_C, whole
whole genome shotgun sequence; 551021553; NZ_ATVT01000008.1
2901; Butyrivibrio sp. AE3009 G588DRAFT_scaffold00030.30_C,
whole genome shotgun sequence; 551035505; NZ_ATVS01000030.1
2902; Acidobacteriaceae bacterium TAA166 strain TAA 166
H979DRAFT_scaffold_0.1_C, whole genome shotgun sequence;
551216990; NZ_ATWD01000001.1
2903; Acidobacteriaceae bacterium TAA166 strain TAA 166
H979DRAFT_scaffold_0.1_C, whole genome shotgun sequence;
551216990; NZ_ATWD01000001.1
2904; Acidobacteriaceae bacterium TAA166 strain TAA 166
H979DRAFT_scaffold_0. l_C, whole genome shotgun sequence;
551216990; NZ_ATWD01000001.1
2905; Leptolyngbya sp. Heron Island J 50, whole genome
shotgun sequence; 553739852; NZ_AWNH01000066.1
2906; Leptolyngbya sp. Heron Island J 50, whole genome
shotgun sequence; 553739852; NZ_AWNH01000066.1
2907; Leptolyngbya sp. Heron Island J 67, whole genome
shotgun sequence; 553740975; NZ_AWNH01000084.1
2908; Klebsiella pneumoniae BIDMC 22 addSE-supercont1.4,
whole genome shotgun sequence; 556268595; NZ_KI535436.1
2909; Klebsiella pneumoniae MGH 19 addTc-supercont1.2,
whole genome shotgun sequence; 556494858; NZ_KI535678.1
2910; Asticcacaulis sp. AC466 contig00008, whole genome
shotgun sequence; 557833377; NZ_AWGE01000008.1
2911; Asticcacaulis sp. AC466 contig00033, whole genome
shotgun sequence; 557835508; NZ_AWGE01000033.1
2912; Asticcacaulis sp. YBE204 contig00005, whole genome
shotgun sequence; 557839256; NZ_AWGF01000005.1
2913; Asticcacaulis sp. YBE204 contig00010, whole genome
shotgun sequence; 557839714; NZ_AWGF01000010.1
2914; Streptomyces roseochromogenus subsp. oscitans DS 12.976
chromosome, whole genome shotgun sequence; 566155502;
NZ_CM002285.1
2915; Streptomyces roseochromogenus subsp. oscitans DS 12.976
chromosome, whole genome shotgun sequence; 566155502;
NZ_CM002285.1
2916; Bacillus sp. 17376 scaffold00002, whole genome shotgun
sequence; 560433869; NZ_KI547189.1
2917; Mesorhizobium sp. LSJC285A00 scaffold0007, whole
genome shotgun sequence; 563442031; NZ_AYVK01000007.1
2918; Mesorhizobium sp. LSJC277A00 scaffold0014, whole
genome shotgun sequence; 563459186; NZ_AYVM01000014.1
2919; Mesorhizobium sp. LSJC269B00 scaffold0015, whole
genome shotgun sequence; 563464990; NZ_AYVN01000015.1
2920; Mesorhizobium sp. LSJC268A00 scaffold0012, whole
genome shotgun sequence; 563469252; NZ_AYVO01000012.1
2921; Mesorhizobium sp. LSJC265A00 scaffold0015, whole
genome shotgun sequence; 563472037; NZ_AYVP01000015.1
2922; Mesorhizobium sp. LSJC264A00 scaffold0029, whole
genome shotgun sequence; 563478461; NZ_AYVQ01000029.1
2923; Mesorhizobium sp. LSJC255A00 scaffold0001, whole
genome shotgun sequence; 563480247; NZ_AYVR01000001.1
2924; Mesorhizobium sp. LSHC426A00 scaffold0005, whole
genome shotgun sequence; 563492715; NZ_AYVV01000005.1
2925; Mesorhizobium sp. LSHC422A00 scaffold0012, whole
genome shotgun sequence; 563497640; NZ_AYVX01000012.1
2926; Mesorhizobium sp. LNJC405B00 scaffold0005, whole
genome shotgun sequence; 563523441; NZ_AYWC01000005.1
2927; Mesorhizobium sp. LNJC403B00 scaffold0001, whole
genome shotgun sequence; 563526426; NZ_AYWD01000001.1
2928; Mesorhizobium sp. LNJC399B00 scaffold0004, whole
genome shotgun sequence; 563530011; NZ_AYWE01000004.1
2929; Mesorhizobium sp. LNJC398B00 scaffold0002, whole
genome shotgun sequence; 563532486; NZ_AYWF01000002.1
2930; Mesorhizobium sp. LNJC395A00 scaffold0011, whole
genome shotgun sequence; 563536456; NZ_AYWG01000011.1
2931; Mesorhizobium sp. LNJC394B00 scaffold0005, whole
genome shotgun sequence; 563539234; NZ_AYWH01000005.1
2932; Mesorhizobium sp. LNJC384A00 scaffold0009, whole
genome shotgun sequence; 563544477; NZ_AYWK01000009.1
2933; Mesorhizobium sp. LNJC380A00 scaffold0009, whole
genome shotgun sequence; 563546593; NZ_AYWL01000009.1
2934; Mesorhizobium sp. LNHC232B00 scaffold0020, whole
genome shotgun sequence; 563561985; NZ_AYWP01000020.1
2935; Mesorhizobium sp. LNHC229A00 scaffold0006, whole
genome shotgun sequence; 563567190; NZ_AYWQ01000006.1
2936; Mesorhizobium sp. LNHC221B00 scaffold0001, whole
genome shotgun sequence; 563570867; NZ_AYWR01000001.1
2937; Mesorhizobium sp. LNHC220B00 scaffold0002, whole
genome shotgun sequence; 563576979; NZ_AYWS01000002.1
2938; Mesorhizobium sp. LNHC209A00 scaffold0002, whole
genome shotgun sequence; 563784877; NZ_AYWT01000002.1
2939; Mesorhizobium sp. L48C026A00 scaffold0030, whole
genome shotgun sequence; 563848676; NZ_AYWU01000030.1
2940; Mesorhizobium sp. L2C089B000 scaffold0011, whole
genome shotgun sequence; 563888034; NZ_AYWV01000011.1
2941; Mesorhizobium sp. L2C084A000 scaffold0007, whole
genome shotgun sequence; 563938926; NZ_AYWX01000007.1
2942; Mesorhizobium sp. L2C067A000 scaffold0014, whole
genome shotgun sequence; 563977521; NZ_AYWY01000014.1
2943; Mesorhizobium sp. L2C066B000 scaffold0012, whole
genome shotgun sequence; 563993080; NZ_AYWZ01000012.1
2944; Mesorhizobium sp. L103C119B0 scaffold0005, whole
genome shotgun sequence; 564005047; NZ_AYXE01000005.1
2945; Mesorhizobium sp. L103C105A0 scaffold0004, whole
genome shotgun sequence; 564008267; NZ_AYXF01000004.1
2946; Xanthomonas hortorum pv. carotae str. M081 chromosome,
whole genome shotgun sequence; 565808720; NZ_CM002307.1
2947; Clostridium pasteurianum NRRL B-598, complete genome;
930593557; NZ_CP011966.1
2948; Paenibacillus polymyxa CR1, complete genome;
734699963; NC_023037.2
2949; Streptococcus suis SC84 complete genome, strain
SC84; 253750923; NC_012924.1
2950; Streptococcus suis 10581 Contig00069, whole genome
shotgun sequence; 636868927; NZ_ALKQ01000069.1
2951; Burkholderia pseudomallei HBPUB10134a BP_10134a_103,
whole genome shotgun sequence; 638832186; NZ_AVAL01000102.1
2952; Mycobacterium sp. UM_WGJ Contig_32, whole genome
shotgun sequence; 638971293; NZ_AUWR01000032.1
2953; Mycobacterium iranicum UM_TJL Contig_42, whole genome
shotgun sequence; 638987534; NZ_AUWT01000042.1
2954; Mesorhizobium ciceri CMG6 MescicDRAFT_scaffold_1.2_C,
whole genome shotgun sequence; 639162053; NZ_AWZS01000002.1
2955; Bradyrhizobium sp. ARR65 BraARR65DRAFT_scaffold_
9.10_C, whole genome shotgun sequence; 639168743;
NZ_AWZU01000010.1
2956; Paenibacillus sp. MAEPY2 contig7, whole genome
shotgun sequence; 639451286; NZ_AWUK01000007.1
2957; Verrucomicrobia bacterium LP2A
G346DRAFT_scf7180000000012_quiver.2_C, whole genome
shotgun sequence; 640169055; NZ_JAFS01000002.1
2958; Verrucomicrobia bacterium LP2A
G346DRAFT_scf7180000000012_quiver.2_C, whole genome
shotgun sequence; 640169055; NZ_JAFS01000002.1
2959; Robbsia andropogonis Ba3549 160, whole genome shotgun
sequence; 640451877; NZ_AYSW01000160.1
2960; Bacillus mannanilyticus JCM 10596, whole genome shotgun
sequence; 640600411; NZ_BAMO01000071.1
2961; Bacillus sp. H1a Contig1, whole genome shotgun sequence;
640724079; NZ_AYMH01000001.1
2962; Enterococcus faecalis ATCC 4200 supercont1.2, whole
genome shotgun sequence; 239948580; NZ_GG670372.1
2963; Enterococcus faecalis EnGen0363 strain RMC5 acAqY-
supercont1.4, whole genome shotgun sequence; 502232520;
NZ_KB944632.1
2964; Enterococcus faecalis LA3B-2 Scaffold22, whole genome
shotgun sequence; 522837181; NZ_KE352807.1
2965; Bifidobacterium breve NCFB 2258, complete genome;
749295448; NZ_CP006714.1
2966; Sphingomonas sanxanigenens NX02, complete genome;
749321911; NZ_CP006644.1
2967; Nocardia nova SH22a, complete genome; 753809381;
NZ_CP006850.1
2968; Kutzneria albida DSM 43870, complete genome; 754862786;
NZ_CP007155.1
2969; Paenibacillus polymyxa SQR-21, complete genome;
749205063; NZ_CP006872.1
2970; Burkholderia thailandensis E264 chromosome I, complete
sequence; 83718394; NC_007651.1
2971; Burkholderia thailandensis H0587 chromosome 1, complete
sequence; 759581710; NZ_CP004089.1
2972; Sphingobium barthaii strain KK22, whole genome shotgun
sequence; 646523831; NZ_BATN01000047.1
2973; Sphingobium barthaii strain KK22, whole genome shotgun
sequence; 646529442; NZ_BATN01000092.1
2974; Paenibacillus polymyxa 1-43 S143_contig00221, whole
genome shotgun sequence; 647225094; NZ_ASRZ01000173.1
2975; Paenibacillus sp. 1-49 5149_contig00281, whole genome
shotgun sequence; 647230448; NZ_ASRY01000102.1
2976; Paenibacillus graminis RSA19 S2_contig00597, whole
genome shotgun sequence; 647256651; NZ_ASSG01000304.1
2977; Paenibacillus sp. 1-18 S118_contig00103, whole genome
shotgun sequence; 647269417; NZ_ASSB01000031.1
2978; Paenibacillus polymyxa TD94 STD94_contig00759, whole
genome shotgun sequence; 647274605; NZ_ASSA01000134.1
2979; Bacillus flexus T6186-2 contig_106, whole genome shotgun
sequence; 647636934; NZ_JANV01000106.1
2980; Brevundimonas naejangsanensis strain B1 contig000018,
whole genome shotgun sequence; 647728918; NZ_JHOF01000018.1
2981; Burkholderia thailandensis E555 BTHE555_314, whole
genome shotgun sequence; 485035557; NZ_AECN01000315.1
2982; Burkholderia oklahomensis C6786 chromosome I, complete
sequence; 780352952; NZ_CP009555.1
2983; Bacillus endophyticus 2102 contig21, whole genome shotgun
sequence; 485049179; NZ_ALIM01000014.1
2984; Methylococcus capsulatus str. Texas = ATCC 19069 strain Texas
contig0129, whole genome shotgun sequence; 483090991;
NZ_AMCE01000064.1
2985; Sphingomonas-like bacterium B12, whole genome shotgun
sequence; 484115568; NZ_BACX01000797.1
2986; Nocardiopsis halotolerans DSM 44410 contig 372, whole
genome shotgun sequence; 484016556; NZ_ANAX01000372.1
2987; Nonomumea coxensis DSM 45129 A3G7DRAFT_scaffold_
4.5, whole genome shotgun sequence; 483454700; NZ_KB903974.1
2988; Streptomyces sp. CcalMP-8W B053DRAFT_scaffold_01,
whole genome shotgun sequence; 483961722; NZ_KB890915.1
2989; Spirosoma spitsbergense DSM 19989 B157DRAFT_scaffold_
76.77, whole genome shotgun sequence; 483994857; NZ_KB893599.1
2990; Butyrivibrio sp. XBB1001 G631DRAFT_scaffold00005.5_C,
whole genome shotgun sequence; 651376721; NZ_AUKA01000006.1
2991; Butyrivibrio sp. XPD2002 G587DRAFT_scaffold00011.11,
whole genome shotgun sequence; 651381584; NZ_KE384117.1
2992; Butyrivibrio sp. NC3005 G634DRAFT_scaffold00001.1,
whole genome shotgun sequence; 651394394; NZ_KE384206.1
2993; Butyrivibrio sp. MC2021 T359DRAFT_scaffold00010.10_C,
whole genome shotgun sequence; 651407979; NZ_JHXX01000011.1
2994; Paenarthrobacter nicotinovorans 231Sha2.1M6
I960DRAFT_scaffold00004.4_C, whole genome shotgun sequence;
651445346; NZ_AZVC01000006.1
2995; Bacillus sp. J37 BacJ37DRAFT_scaffold_0.1_C, whole
genome shotgun sequence; 651516582; NZ_JAEK01000001.1
2996; Bacillus sp. J37 BacJ37DRAFT_scaffold_0.1_C, whole
genome shotgun sequence; 651516582; NZ_JAEK01000001.1
2997; Bacillus sp. UNC437CL72CviS29 M014DRAFT_
scaffold00009.9_C, whole genome shotgun sequence; 651596980;
NZ_AXVB01000011.1
2998; Butyrivibrio sp. FC2001 G601DRAFT_scaffold00001.1,
whole genome shotgun sequence; 651921804; NZ_KE384132.1
2999; Bacillus bogoriensis ATCC BAA-922 T323DRAFT_
scaffold00008.8_C, whole genome shotgun sequence; 651937013;
NZ_JHYI01000013.1
3000; Bacillus bogoriensis ATCC BAA-922 T323DRAFT_
scaffold00008.8_C, whole genome shotgun sequence; 651937013;
NZ_JHYI01000013.1
3001; Bacillus kribbensis DSM 17871 H539DRAFT_scaffold00003.3,
whole genome shotgun sequence; 651983111; NZ_KE387239.1
3002; Fischerella sp. PCC 9431 Fis9431DRAFT_Scaffold1.2, whole
genome shotgun sequence; 652326780; NZ_KE650771.1
3003; Fischerella sp. PCC 9605 FIS9605DRAFT_scaffold2.2, whole
genome shotgun sequence; 652337551; NZ_KI912149.1
3004; Clostridium akagii DSM 12554 BR66DRAFT_scaffold00010.10_C,
whole genome shotgun sequence; 652488076; NZ_JMLK01000014.1
3005; Clostridium beijerinckii HUN142 T483DRAFT_scaffold00004.4,
whole genome shotgun sequence; 652494892; NZ_KK211337.1
3006; Glomeribacter sp. 1016415 H174DRAFT_scaffold00001.1, whole
genome shotgun sequence; 652527059; NZ_KE384226.1
3007; Glomeribacter sp. 1016415 H174DRAFT_scaffold00001.1, whole
genome shotgun sequence; 652527059; NZ_KE384226.1
3008; Mesorhizobium sp. URHA0056 H959DRAFT_scaffold00004.4_C,
whole genome shotgun sequence; 652670206; NZ_AUEL01000005.1
3009; Mesorhizobium loti R88b Meslo2DRAFT_Scaffold1.1, whole
genome shotgun sequence; 652688269; NZ_KI912159.1
3010; Mesorhizobium ciceri WSM4083 MESCI2DRAFT_scaffold_0.1,
whole genome shotgun sequence; 652698054; NZ_KI912610.1
3011; Mesorhizobium sp. URHC0008 N549DRAFT_scaffold00001.1_C,
whole genome shotgun sequence; 652699616; NZ_JIAP01000001.1
3012; Mesorhizobium sp. URHB0007 N550DRAFT_scaffold00001.1_C,
whole genome shotgun sequence; 652714310; NZ_JIA001000011.1
3013; Mesorhizobium erdmanii USDA 3471 A3AUDRAFT_
scaffold_7.8_C, whole genome shotgun sequence; 652719874;
NZ_AXAE01000013.1
3014; Mesorhizobium loti CJ3sym A3A9DRAFT_scaffold 25.26_C,
whole genome shotgun sequence; 652734503; NZ_AXAL01000027.1
3015; Cohnella thermotolerans DSM 17683 G485DRAFT_
scaffold00041.41_C, whole genome shotgun sequence; 652787974;
NZ_AUCP01000055.1
3016; Cohnella thermotolerans DSM 17683 G485DRAFT_
scaffold00041.41_C, whole genome shotgun sequence; 652787974;
NZ_AUCP01000055.1
3017; Cohnella thermotolerans DSM 17683 G485DRAFT_
scaffold00003.3, whole genome shotgun sequence; 652794305;
NZ_KE386956.1
3018; Lachnospiraceae bacterium NK4A144 G619DRAFT_
scaffold00002.2_C, whole genome shotgun sequence; 652826657;
NZ_AUJT01000002.1
3019; Mesorhizobium sp. WSM3626 Mesw3626DRAFT_scaffold_6.7_
C, whole genome shotgun sequence; 652879634; NZ_AZUY01000007.1
3020; Mesorhizobium sp. WSM1293 MesloDRAFT_scaffold_4.5,
whole genome shotgun sequence; 652910347; NZ_KI911320.1
3021; Mesorhizobium sp. WSM3224 YU3DRAFT_scaffold_3.4_C,
whole genome shotgun sequence; 652912253; NZ_ATYO01000004.1
3022; Butyrivibrio fibrisolvens MD2001 G635DRAFT_
scaffold00033.33_C, whole genome shotgun sequence; 652963937;
NZ_AUKD01000034.1
3023; Legionella pneumophila subsp. pneumophila strain ATCC 33155
contig032, whole genome shotgun sequence; 652971687;
NZ_JFIN01000032.1
3024; Legionella pneumophila subsp. pneumophila strain ATCC 33154
Scaffold2, whole genome shotgun sequence; 653016013; NZ_KK074241.1
3025; Legionella pneumophila subsp. pneumophila strain ATCC 33823
Scaffold7, whole genome shotgun sequence; 653016661; NZ_KK074199.1
3026; Bacillus sp. URHB0009 H980DRAFT_scaffold00016.16_C,
whole genome shotgun sequence; 653070042; NZ_AUER01000022.1
3027; Lachnospira multipara ATCC 19207 G600DRAFT_
scaffold00009.9_C, whole genome shotgun sequence;
653218978; NZ_AUJG01000009.1
3028; Lachnospira multipara MC2003 T520DRAFT_scaffold00007.7_C,
whole genome shotgun sequence; 653225243; NZ_JHWY01000011.1
3029; Rhodanobacter sp. OR87 RhoOR87DRAFT_scaffold_24.25S, whole
genome shotgun sequence; 653308965; NZ_AXBJ01000026.1
3030; Rhodanobacter sp. OR92 RhoOR92DRAFT_scaffold_6.7_C, whole
genome shotgun sequence; 653321547; NZ_ATYF01000013.1
3031; Rhodanobacter sp. OR444RHOOR444DRAFT
NODES len_27336_cov_289_843719.5_C, whole
genome shotgun sequence; 653325317; NZ_ATYD01000005.1
3032; Rhodanobacter sp. OR444 RHOOR444DRAFT_
NODE_39_len_52063_cov_320_872864.39, whole
genome shotgun sequence; 653330442; NZ_KE386531.1
3033; Bradyrhizobium sp. WSM1743 YU9DRAFT_scaffold_1.2_C, whole
genome shotgun sequence; 653526890; NZ_AXAZ01000002.1
3034; Bradyrhizobium sp. Ai1a-2 K288DRAFT_scaffold00086.86_C,
whole genome shotgun sequence; 653556699; NZ_AUEZ01000087.1
3035; Clostridium butyricum AGR2140 G607DRAFT_scaffold00008.8_C,
whole genome shotgun sequence; 653632769; NZ_AUJN01000009.1
3036; Mastigocoleus testarum BC008 Contig-2, whole genome
shotgun sequence; 959926096; NZ_LMTZ01000085.1
3037; [Eubacterium] cellulosolvens LD2006 T358DRAFT_
scaffold00002.2_C, whole genome shotgun sequence; 654392970;
NZ_JHXY01000005.1
3038; Desulfatiglans anilini DSM 4660 H567DRAFT_scaffold00005.5_
C, whole genome shotgun sequence; 654868823; NZ_AULM01000005.1
3039; Legionella pneumophila subsp. fraseri strain ATCC 35251
contig031, whole genome shotgun sequence; 654928151;
NZ_JFIG01000031.1
3040; Bacillus sp. FJAT-14578 Scaffold2, whole genome
shotgun sequence; 654948246; NZ_KI632505.1
3041; Bacillus sp. J13 PaeJ13DRAFT_scaffold_4.5_C, whole
sequence; 654954291; NZ_JAEO01000006.1
3042; Bacillus sp. 278922_107 H622DRAFT_scaffold00001.1,
whole genome shotgun sequence; 654964612; NZ_KI911354.1
3043; Streptomyces sp. GXT6 genomic scaffold Scaffold4, whole
genome shotgun sequence; 654975403; NZ_KI601366.1
3044; Ruminococcus flavefaciens ATCC 19208 L870DRAFT_
scaffold00001.1, whole genome shotgun sequence; 655069822;
NZ_KI912489.1
3045; Paenibacillus sp. UNCCL52 BR01DRAFT_scaffold00001.1,
whole genome shotgun sequence; 655095448; NZ_KK366023.1
3046; Paenibacillus sp. UNC451MF BP97DRAFT_scaffold00018.18_C,
whole genome shotgun sequence; 655103160; NZ_JMLS01000021.1
3047; Paenibacillus pinihumi DSM 23905 = JCM 16419 strain
DSM 23905 H583DRAFT_scaffold00005.5, whole genome shotgun
sequence; 655115689; NZ_KE383867.1
3048; Desulfobulbus japonicus DSM 18378 G493DRAFT_
scaffold00011.11_C, whole genome shotgun sequence; 655133038;
NZ_AUCV01000014.1
3049; Desulfobulbus mediterraneus DSM 13871
G494DRAFT_scaffold00028.28_C, whole genome shotgun sequence;
655138083; NZ_AUCW01000035.1
3050; Paenibacillus harenae DSM 16969 H581DRAFT_scaffold00002.2,
whole genome shotgun sequence; 655165706; NZ_KE383843.1
3051; Shimazuella kribbensis DSM 45090 A3GQDRAFT_scaffold_0.1_C,
whole genome shotgun sequence; 655370026; NZ_ATZF01000001.1
3052; Shimazuella kribbensis DSM 45090 A3GQDRAFT_scaffold_5.6_C,
whole genome shotgun sequence; 655371438; NZ_ATZF01000006.1
3053; Streptomyces flavidovirens DSM 40150 G412DRAFT_
scaffold00007.7_C, whole genome shotgun sequence; 655414006;
NZ_AUBE01000007.1
3054; Streptomyces flavidovirens DSM 40150 G412DRAFT_
scaffold00009.9, whole genome shotgun sequence; 655416831;
NZ_KE386846.1
3055; Terasakiella pusilla DSM 6293 Q397DRAFT_scaffold00039.39_C,
whole genome shotgun sequence; 655499373; NZ_JHYO01000039.1
3056; Pseudoxanthomonas suwonensis J43 Psesu2DRAFT_
scaffold_44.45_C, whole genome shotgun sequence; 655566937;
NZ_JAES01000046.1
3057; Pseudonocardia acaciae DSM 45401 N912DRAFT_
scaffold00002.2_C, whole genome shotgun sequence; 655569633;
NZ_JIAI01000002.1
3058; Azospirillum halopraeferens DSM 3675
G472DRAFT_scaffold00039.39_C, whole genome shotgun sequence;
655967838; NZ_AUCF01000044.1
3059; Clostridium scatologenes strain ATCC 25775, complete genome;
802929558; NZ_CP009933.1
3060; Paenibacillus harenae DSM 16969 H581DRAFT_
scaffold00004.4, whole genome shotgun sequence; 656245934;
NZ_KE383845.1
3061; Paenibacillus harenae DSM 16969 H581DRAFT_
scaffold00004.4, whole genome shotgun sequence; 656245934;
NZ_KE383845.1
3062; Paenibacillus alginolyticus DSM 5050 = NBRC 15375 strain
DSM 5050 G519DRAFT_scaffold00043.43_C, whole genome
shotgun sequence; 656249802; NZ_AUGY01000047.1
3063; Bacillus indicus strain DSM 16189 Contig01, whole genome
shotgun sequence; 737222016; NZ_JNVC02000001.1
3064; Acaryochloris sp. CCMEE 5410 contig00232, whole genome
shotgun sequence; 359367134; NZ_AFEJ01000154.1
3065; Bacillus sp. RP1137 contig_18, whole genome shotgun sequence;
657210762; NZ_AXZS01000018.1
3066; Streptomyces leeuwenhoekii strain C34(2013) c34_sequence_0501,
whole genome shotgun sequence; 657301257; NZ_AZSD01000480.1
3067; Brevundimonas bacteroides DSM 4726 Q333DRAFT_
scaffold00004.4_C, whole genome shotgun sequence; 657605746;
NZ_JNIX01000010.1
3068; Bacillus thuringiensis LM1212 scaffold_08, whole genome shotgun
sequence; 657629081; NZ_AYPV01000024.1
3069; Klebsiella pneumoniae 4541-2 4541_2_67, whole genome shotgun
sequence; 657698352; NZ_JDWO01000067.1
3070; Lachnoclosritidium phytofermentans KNHs212
B010DRAFT_scf7180000000004_quiver.1_C, whole genome shotgun
sequence; 657706549; NZ_JNLM01000001.1
3071; Paenibacillus polymyxa strain WLY78 S6_contig00095, whole
genome shotgun sequence; 657719467; NZ_ALJV01000094.1
3072; Bacillus indicus strain DSM 16189 Contig01, whole genome
shotgun sequence; 737222016; NZ_JNVC02000001.1
3073; [Scytonema hofmanni] UTEX 2349 Tol9009DRAFT_TPD.8, whole
genome shotgun sequence; 657935980; NZ_KK073768.1
3074; Caulobacter sp. UNC358MFTsu5.1 BR39DRAFT_
scaffold00002.2_C, whole genome shotgun sequence; 659864921;
NZ_JONW01000006.1
3075; Sphingomonas sp. YL-JM2C contig056, whole genome
shotgun sequence; 661300723; NZ_ASTM01000056.1
3076; Streptomyces monomycini strain NRRL B-24309
P063_Doro1_scaffold135, whole genome shotgun sequence;
662059070; NZ_KL571162.1
3077; Streptomyces flavotricini strain NRRL B-5419 contig237.1,
whole genome shotgun sequence; 662063073; NZ_JNXV01000303.1
3078; Streptomyces peruviensis strain NRRL ISP-5592 P181_Doro1_
scaffold152, whole genome shotgun sequence; 662097244;
NZ_KL575165.1
3079; Sphingomonas sp. DC-6 scaffold87, whole genome shotgun
sequence; 662140302; NZ_JMUB01000087.1
3080; Streptomyces sp. NRRL S-455 contig1.1, whole genome
shotgun sequence; 663192162; NZ_JOCT01000001.1
3081; Streptomyces griseoluteus strain NRRL ISP-5360 contig43.1,
whole genome shotgun sequence; 663180071; NZ_JOBE01000043.1
3082; Streptomyces sp. NRRL S-350 contig12.1, whole genome
shotgun sequence; 663199697; NZ_JOH001000012.1
3083; Streptomyces katrae strain NRRL B-16271 contig37.1, whole
genome shotgun sequence; 663300941; NZ_JNZY01000037.1
3084; Streptomyces sp. NRRL B-3229 contig5.1, whole genome
shotgun sequence; 663316931; NZ_JOGP01000005.1
3085; Streptomyces flavochromogenes strain NRRL B-2684
contig8.1, whole genome shotgun sequence; 663317502;
NZ_JNZ001000008.1
3086; Streptomyces roseoverticillatus strain NRRL B-3500
contig22.1, whole genome shotgun sequence; 663372343;
NZ_JOFL01000022.1
3087; Streptomyces roseoverticillatus strain NRRL B-3500
contig31.1, whole genome shotgun sequence; 663372947;
NZ_JOFL01000031.1
3088; Streptomyces roseoverticillatus strain NRRL B-3500
contig43.1, whole genome shotgun sequence; 663373497;
NZ_JOFL01000043.1
3089; Streptomyces rimosus subsp. rimosus strain NRRL
WC-3924 contig19.1, whole genome shotgun sequence;
663376433; NZ_JOBW01000019.1
3090; Streptomyces rimosus subsp. rimosus strain NRRL
WC-3924 contig82.1, whole genome shotgun sequence;
663379797; NZ_JOBW01000082.1
3091; Streptomyces sp. NRRL B-12105 contig1.1, whole genome
shotgun sequence; 663380895; NZ_JNZW01000001.1
3092; Herbidospora cretacea strain NRRL B-16917 contig7.1,
whole genome shotgun sequence; 663670981; NZ_JODQ01000007.1
3093; Lechevalieria aerocolonigenes strain NRRL B-3298 contig27.1,
whole genome shotgun sequence; 663693444; NZ_JOFI01000027.1
3094; Microbispora rosea subsp. nonnitritogenes strain NRRL
B-2631 contig12.1, whole genome shotgun sequence; 663732121;
NZ_JNZQ01000012.1
3095; Sphingobium sp. DC-2 ODE_45, whole genome shotgun
6sequence; 63818579; NZ_JNAC01000042.1
3096; Streptomyces aureocirculatus strain NRRL ISP-5386 contig49.1,
whole genome shotgun sequence; 664026629; NZ_JOAP01000049.1
3097; Streptomyces rimosus subsp. rimosus strain NRRL
B-2660 contig14.1, whole genome shotgun sequence; 664052786;
NZ_JOES01000014.1
3098; Streptomyces achromogenes subsp. achromogenes strain
NRRL B-2120 contig2.1, whole genome shotgun sequence;
664063830; NZ_JODT01000002.1
3099; Streptomyces rimosus subsp. rimosus strain NRRL B-2660
contig124.1, whole genome shotgun sequence; 664066234;
NZ_JOES01000124.1
3100; Streptomyces rimosus subsp. rimosus strain NRRL WC-3927
contig5.1, whole genome shotgun sequence; 664091759;
NZ_JOBO01000005.1
3101; Streptomyces rimosus subsp. rimosus strain NRRL WC-3869
P248contig50.1, whole genome shotgun sequence; 925315417;
LGCQ01000244.1
3102; Streptomyces rimosus subsp. rimosus strain NRRL
WC-3929 contig5.1, whole genome shotgun sequence;
664104387; NZ_J0JJ01000005.1
3103; Streptomyces rimosus subsp. rimosus strain NRRL
WC-3929 contig46.1, whole genome shotgun sequence;
664115745; NZ__JOJJ01000046.1
3104; Streptomyces rimosus subsp. rimosus strain NRRL
WC-3904 contig10.1, whole genome shotgun sequence;
664126885; NZ_JOCQ01000010.1
3105; Streptomyces rimosus subsp. rimosus strain NRRL
WC-3904 contig106.1, whole genome shotgun sequence;
664141810; NZ_JOCQ01000106.1
3106; Streptomyces sp. NRRL F-2890 contig2.1, whole genome
shotgun sequence; 664194528; NZ_JOIG01000002.1
3107; Streptomyces griseus subsp. griseus strain NRRL F-5618
contig4.1, whole genome shotgun sequence; 664233412;
NZ_JOGN01000004.1
3108; Streptomyces lavenduligriseus strain NRRL ISP-5487 contig2.1,
whole genome shotgun sequence; 664244706; NZ_JOBD01000002.1
3109; Streptomyces sp. NRRL S-920 contig3.1, whole genome
shotgun sequence; 664245663; NZ_JODF01000003.1
3110; Streptomyces hygroscopicus subsp. hygroscopicus strain
NRRL B-1477 contig8.1, whole genome shotgun sequence;
664299296; NZ_JOIK01000008.1
3111; Streptomyces sp. NRRL F-4474 contig32.1, whole genome
shotgun sequence; 664323078; NZ_JOIB01000032.1
3112; Streptomyces sp. NRRL S-475 contig32.1, whole genome
shotgun sequence; 664325162; NZ_JOJB01000032.1
3113; Streptomyces sp. NRRL F-5053 contig1.1, whole genome
shotgun sequence; 664356765; NZ_JOHT01000001.1
3114; Streptomyces sp. NRRL S-1868 contig54.1, whole genome
shotgun sequence; 664360925; NZ_JOGD01000054.1
3115; Streptomyces sp. NRRL S-646 contig23.1, whole genome
shotgun sequence; 664421883; NZ_JODC01000023.1
3116; Streptomyces sp. NRRL S-455 contig1.1, whole genome
shotgun sequence; 663192162; NZ_JOCT01000001.1
3117; Streptomyces sp. NRRL S-481 P269_Doro1_scaffold20,
whole genome shotgun sequence; 664428976; NZ_KL585179.1
3118; Streptomyces sp. NRRL F-5140 contig927.1, whole
genome shotgun sequence; 664434000; NZ_JOIA01001078.1
3119; Streptomyces sp. NRRL WC-3773 contig2.1, whole
genome shotgun sequence; 664478668; NZ_JOJI01000002.1
3120; Streptomyces sp. NRRL WC-3773 contig5.1, whole
genome shotgun sequence; 664479796; NZ_JOJI01000005.1
3121; Streptomyces sp. NRRL WC-3773 contig11.1, whole
genome shotgun sequence; 664481891; NZ_JOJI01000011.1
3122; Streptomyces sp. NRRL WC-3773 contig11.1, whole
genome shotgun sequence; 664481891; NZ_JOJI01000011.1
3123; Streptomyces puniceus strain NRRL ISP-5083 contig3.1,
whole genome shotgun sequence; 663149970; NZ_JOBQ01000003.1
3124; Streptomyces ochraceiscleroticus strain NRRL ISP-5594
contig9.1, whole genome shotgun sequence; 664540649;
NZ_JOAX01000009.1
3125; Streptomyces durhamensis strain NRRL B-3309 contig3.1,
whole genome shotgun sequence; 665586974; NZ_JNXR01000003.1
3126; Streptomyces durhamensis strain NRRL B-3309 contig23.1,
whole genome shotgun sequence; 665604093; NZ_JNXR01000023.1
3127; Streptomyces rimosus subsp. rimosus strain NRRL WC-3869
P248contig20.1, whole genome shotgun sequence; 925322461;
LGCQ01000113.1
3128; Streptomyces niveus NCIMB 11891 chromosome, whole
genome shotgun sequence; 566146291; NZ_CM002280.1
3129; Paenibacillus polymyxa strain CICC 10580 contig_11,
whole genome shotgun sequence; 670516032; NZ_JNCB01000011.1
3130; Streptomyces megasporus strain NRRL B-16372 contig19.1,
whole genome shotgun sequence; 671525382; NZ_JODL01000019.1
3131; Dyadobacter crusticola DSM 16708 Q369DRAFT_
scaffold00002.2, whole genome shotgun sequence; 671546962;
NZ_KL370786.1
3132; Bacillus sp. MB2021 T349DRAFT_scaffold00010.10_C,
whole genome shotgun sequence; 671553628; NZ_JNJJ01000011.1
3133; Lachnospira multipara LB2003 T537DRAFT_
scaffold00010.10_C, whole genome shotgun sequence; 671578517;
NZ_JNKW01000011.1
3134; Clostridium drakei strain SL1 contig 20, whole genome
shotgun sequence; 692121046; NZ_JIBU02000020.1
3135; Candidatus Paracaedibacter symbiosus strain PRA9 Scaffold 1,
whole genome shotgun sequence; 692233141; NZ_JQAK01000001.1
3136; Stenotrophomonas maltophilia strain 53 contig_2, whole
genome shotgun sequence; 692316574; NZ_JRJA01000002.1
3137; Rhodococcus fascians LMG 3625 contig38, whole genome
shotgun sequence; 694033726; NZ_JMEM01000016.1
3138; Rhodococcus fascians 04-516 contig54, whole genome
shotgun sequence; 694058371; NZ_JMFD01000020.1
3139; Klebsiella michiganensis strain R8A contig_44, whole
genome shotgun sequence; 695806661; NZ_JNCH01000044.1
3140; Streptomyces globisporus C-1027 Scaffold24_1, whole
genome shotgun sequence; 410651191; NZ_AJUO01000171.1
3141; Streptomyces sp. NRRL B-1381 contig33.1, whole genome
shotgun sequence; 663334964; NZ_JOHG01000033.1
3142; Streptomyces sp. SolWspMP-sol2th B083DRAFT_
scaffold_17.18_C, whole genome shotgun sequence; 654969845;
NZ_ARPF01000020.1
3143; Streptomyces alboviridis strain NRRL B-1579 contig18.1,
whole genome shotgun sequence; 695845602; NZ_JNWU01000018.1
3144; Streptomyces sp. NRRL F-5681 contig10.1, whole genome
shotgun sequence; 663292631; NZ_JOHA01000010.1
3145; Streptomyces globisporus subsp. globisporus strain
NRRL B-2709 contig24.1, whole genome shotgun sequence;
664051798; NZ_JNZK01000024.1
3146; Streptomyces griseus subsp. griseus strain NRRL
F-5144 contig19.1, whole genome shotgun sequence;
664184565; NZ_JOGA01000019.1
3147; Streptomyces floridar strain NRRL 2423 contig7.1, whole
genome shotgun sequence; 663343774; NZ_JOAC01000007.1
3148; Streptomyces roseosporus NRRL 11379 supercont4.1, whole
genome shotgun sequence; 588273405; NZ_ABYX02000001.1
3149; Streptomyces cyaneofuscatus strain NRRL B-2570 contig9.1,
whole genome shotgun sequence; 664021017; NZ_JOEM01000009.1
3150; Streptomyces sp. NRRL S-623 contig14.1, whole genome
shotgun sequence; 665522165; NZ_JOJC01000016.1
3151; Streptomyces sp. JS01 contig2, whole genome shotgun
sequence; 695871554; NZ_JPWW01000002.1
3152; Streptomyces albus subsp. albus strain NRRL B-2445
contig28.1, whole genome shotgun sequence; 664095100;
NZ_JOED01000028.1
3153; Streptomyces baamensis strain NRRL B-2842 P144_
Doro1_scaffold26, whole genome shotgun sequence;
662135579; NZ_KL573564.1
3154; Streptomyces griseus subsp. griseus strain NRRL F-2227
contig41.1, whole genome shotgun sequence;
664325626; NZ_JOIT01000041.1
3155; Streptomyces sp. W007 contig00293, whole genome
shotgun sequence; 365867746; NZ_AGSW01000272.1
3156; Streptomyces mediolani strain NRRL WC-3934 contig31.1,
whole genome shotgun sequence; 664285409;
NZ_JOJK01000031.1
3157; Streptomyces sp. NRRL WC-3773 contig36.1, whole
genome shotgun sequence; 664487325; NZ_JOJI01000036.1
3158; Mesorhizobium japonicum R7A MesloDRAFT_Scaffold1.1,
whole genome shotgun sequence; 696358903; NZ_KI632510.1
3159; Stenotrophomonas maltophilia RA8, whole genome
shotgun sequence; 493412056; NZ_CALM01000701.1
3160; Streptomyces rimosus subsp. rimosus strain NRRL
B-2660 contig59.1, whole genome shotgun sequence;
664061406; NZ_JOES01000059.1
3161; Streptomyces rimosus subsp. rimosus strain NRRL
B-16073 contig7.1, whole genome shotgun sequence;
696493030; NZ_JNWX01000007.1
3162; Streptomyces rimosus subsp. rimosus strain NRRL
B-16073 contig48.1, whole genome shotgun sequence;
696497741; NZ_JNWX01000048.1
3163; Sphingopyxis sp. MWB1 contig00002, whole genome
shotgun sequence; 696542396; NZ_JQFJ01000002.1
3164; Blautia producta strain ER3 contig_8, whole genome
shotgun sequence; 696661199; NZ_JPJF01000008.1
3165; Streptomyces griseus subsp. griseus strain NRRL B-2307
contig15.1, whole genome shotgun sequence; 702684649;
NZ_JNZI01000015.1
3166; Kitasatospora setae KM-6054 DNA, complete genome;
NC_016109.1
3167; Streptomyces lydicus strain NRRL ISP-5461 contig41.1,
whole genomes hotgun sequence; 702808005; NZ_JNZA01000041.1
3168; Streptomyces iakyrus strain NRRL ISP-5482 contig6.1,
whole genome shotgun sequence; 702914619; NZ_JNXI01000006.1
3169; Kibdelosporangium aridum subsp. largum strain NRRL
B-24462 contig4.56, whole genome shotgun sequence; 703210604;
NZ_JNYM01000124.1
3170; Kibdelosporangium aridum subsp. largum strain NRRL
B-24462 contig91.4, whole genome shotgun sequence;
703243970; NZ_JNYM01001429.1
3171; Xanthomonas campestris pv. viticola strain LMG 965,
whole genome shotgun sequence; 704493846;
NZ_CBZT010000006.1
3172; Streptomyces galbus strain KCCM 41354 contig00021,
whole genome shotgun sequence; 716912366; NZ_JRHJ01000016.1
3173; Bacillus aryabhattai strain GZ03 contig1_scaffold1, whole
genome shotgun sequence; 723602665; NZ_JPIE01000001.1
3174; Bacillus mycoides FSL H7-687 Contig052, whole genome
shotgun sequence; 727271768; NZ_ASPY01000052.1
3175; Bacillus mycoides strain Flugge 10206 DJ94.contig-100_16,
whole genome shotgun sequence; 727343482; NZ_JMQD01000030.1
3176; Streptomyces anulatus strain NRRL B-2873 contig21.1,
whole genome shotgun sequence; 664049400; NZ_JOEZ01000021.1
3177; Sphingomonas sp. 37zxx contig3_scaffold2, whole
genome shotgun sequence; 728813405; NZ_JROH01000003.1
3178; Sphingomonas sp. 35-24ZXX contig00_scaffold4, whole
genome shotgun sequence; 728827031; NZ_JROG01000008.1
3179; Sphingomonas sp. Ant H11 contig_149, whole genome
shotgun sequence; 730274767; NZ_JSBN01000149.1
3180; Sphingomonas sp. ERG5 Contig74, whole genome
shotgun sequence; 734983081; NZ_JSXI01000073.1
3181; Sphingomonas sp. ERG5 Contig80, whole genome
shotgun sequence; 734983422; NZ_JSXI01000079.1
3182; Bacillus sp. 72 T409DRAFT_scf7180000000077_quiver.
15_C, whole genome shotgun sequence; 736160933;
NZ_JQMI01000015.1
3183; Bacillus simplex BA2H3 scaffold2, whole genome
shotgun sequence; 736214556; NZ_KN360955.1
3184; Dehalobacter sp. UNSWDHB Contig_139, whole genome
shotgun sequence; 544905305; NZ_AUUR01000139.1
3185; Bacillus manliponensis strain JCM 15802 contig4, whole
genome shotgun sequence; 736629899; NZ_JOTN01000004.1
3186; Hyphomonas chukchiensis strain BH-BN04-4 contig6,
whole genome shotgun sequence; 736739493;
NZ_AWFG01000063.1
3187; Bacillus vietnamensis strain HD-02, whole genome
shotgun sequence; 736762362; NZ_CCDN010000009.1
3188; Hyphomonas sp. CY54-11-8 contig4, whole genome
shotgun sequence; 736764136; NZ_AWFD01000033.1
3189; Erythrobacter longus strain DSM 6997 contig9, whole
genome shotgun sequence; 736965849; NZ_JMEW01000009.1
3190; Caulobacter henficii strain CF287 EW90DRAFT
scaffold00023.23_C, whole genome shotgun sequence;
737089868; NZ_JQJN01000025.1
3191; Caulobacter henficii strain YR570 EX13DRAFT_
scaffold00022.22_C, whole genome shotgun sequence;
737103862; NZ_JQJP01000023.1
3192; Calothrix sp. 336/3, complete genome; 821032128;
NZ_CP011382.1
3193; Desulfobacter vibfiofonnis DSM 8776 Q366DRAFT_
scaffold00036.35_C, whole genome shotgun sequence;
737257311; NZ_JQKJ01000036.1
3194; Actinokineospora spheciospongiae strain EG49
contig1268_1, whole genome shotgun sequence; 737301464;
NZ_AYXG01000139.1
3195; Brevundimonas sp. EAKA contig5, whole genome
shotgun sequence; 737322991; NZ_JMQR01000005.1
3196; Brevundimonas sp. EAKA contig5, whole genome
shotgun sequence; 737322991; NZ_JMQR01000005.1
3197; Brevundimonas sp. EAKA contig12, whole genome
shotgun sequence; 737323704; NZ_JMQR01000012.1
3198; Bacillus firmus DS1 scaffold33, whole genome shotgun
sequence; 737350949; NZ_APVL01000034.1
3199; Bacillus hemicellulosilyticus JCM 9152, whole genome
shotgun sequence; 737360192; NZ_BAUU01000008.1
3200; Edaphobacter aggregans DSM 19364 Q363DRAFT_
scaffold00032.32_C, whole genome shotgun sequence;
737370143; NZ_JQKI01000040.1
3201; Bacillus sp. UNC322MFChir4.1 BR72DRAFT_
scaffold00004.4, whole genome shotgun sequence; 737456981;
NZ_KN050811.1
3202; Haloglycomyces albus DSM 45210 HalalDRAFT_
chromosome1.1_C, whole genome shotgun sequence; 644043488;
NZ_AZUQ01000001.1
3203; Hyphomonas oceanitis SCH89 contig20, whole genome
shotgun sequence; 737567115; NZ_ARYL01000020.1
3204; Hyphomonas oceanitis SCH89 contig59, whole genome
shotgun sequence; 737569369; NZ_ARYL01000059.1
3205; Halobacillus sp. BBL2006 cont444, whole genome
shotgun sequence; 737576092; NZ_JRNX01000441.1
3206; Hyphomonas atlantica strain 22II1-22F38 contig10, whole
genome shotgun sequence; 737577234; NZ_AWFH01000002.1
3207; Hyphomonas atlantica strain 22II1-22F38 contig28, whole
genome shotgun sequence; 737580759; NZ_AWFH01000021.1
3208; Hyphomonas jannaschiana VP2 contig2, whole genome
shotgun sequence; 737608363; NZ_ARYJ01000002.1
3209; Bacillus akibai JCM 9157, whole genome shotgun
sequence; 737696658; NZ_BAUV01000025.1
3210; Frankia sp. CcI6 CcI6DRAFT_scaffold_16.17, whole
genome shotgun sequence; 564016690; NZ_AYTZ01000017.1
3211; Frankia sp. Thr ThrDRAFT_scaffold_48.49, whole
genome shotgun sequence; 602261491; JENI01000049.1
3212; Frankia sp. Thr ThrDRAFT_scaffold 28.29, whole
genome shotgun sequence; 602262270; JENI01000029.1
3213; Frankia sp. CcI6 CcI6DRAFT_scaffold_16.17, whole
genome shotgun sequence; 564016690; NZ_AYTZ01000017.1
3214; [Leptolyngbya] sp. JSC-1
Osccy1DRAFT_CYJSC1_DRAF_scaffold00069.1, whole
genome shotgun sequence; 738050739; NZ_KL662191.1
3215; Lysobacter darjeonensis GH1-9 contig23, whole genome
shotgun sequence; 738180952; NZ_AVPU01000014.1
3216; Myxosarcina sp. GI1 contig_5, whole genome shotgun
sequence; 738529722; NZ_JRFE01000006.1
3217; Novosphingobium resinovorum strain KF1 contig000002,
whole genome shotgun sequence; 738613868; NZ_JFYZ01000002.1
3218; Novosphingobium resinovorum strain KF1 contig000008,
whole genome shotgun sequence; 738615271; NZ_JFYZ01000008.1
3219; Novosphingobium resinovorum strain KF1 contig000015,
whole genome shotgun sequence; 738617000; NZ_JFYZ01000015.1
3220; Paenibacillus sp. FSL H7-689 Contig015, whole genome
shotgun sequence; 738716739; NZ_ASPU01000015.1
3221; Paenibacillus wynnii strain DSM 18334 unitig_2, whole
genome shotgun sequence; 738760618; NZ_JQCR01000002.1
3222; Pandoraea sp. SD6-2 scaffold29, whole genome
shotgun sequence; 505733815; NZ_KB944444.1
3223; Paenibacillus sp. FSL R7-269 Contig022, whole genome
shotgun sequence; 738803633; NZ_ASPS01000022.1
3224; Paenibacillus taiwanensis DSM 18679 H509DRAFT_
scaffold00010.10_C, whole genome shotgun sequence; 655095554;
NZ_AULE01000001.1
3225; Paenibacillus sp. FSL R7-277 Contig088, whole genome
shotgun sequence; 738841140; NZ_ASPX01000088.1
3226; Prevotella oryzae DSM 17970 XylorDRAFT_XOA.1, whole
genome shotgun sequence; 738999090; NZ_KK073873.1
3227; Promicromonospora kroppenstedtii DSM 19349 ProkrDRAFT_
PKA.71, whole genome shotgun sequence; 739097522; NZ_KI911740.1
3228; Pseudonocardia acaciae DSM 45401 N912DRAFT_
scaffold00002.2_C, whole genome shotgun sequence; 655569633;
NZ_JIAI01000002.1
3229; Rhodanobacter sp. 115 contig437, whole genome
shotgun sequence; 389759651; NZ_AJXS01000437.1
3230; Rhodococcus fascians A21d2 contig10, whole genome
shotgun sequence; 739287390; NZ_JMFA01000010.1
3231; Ruminococcus albus 8 contig00035, whole genome
shotgun sequence; 325680876; NZ_ADKM02000123.1
3232; Rubellimicrobium mesophilum DSM 19309 scaffold23,
whole genome shotgun sequence; 739419616; NZ_KK088564.1
3233; Rothia aeria F0184 Scaffold136, whole genome shotgun
sequence; 553804563; NZ_K1518028.1
3234; Amycolatopsis orientalis DSM 40040 = KCTC 9412 contig_32,
whole genome shotgun sequence; 499136900; NZ_ASJB01000015.1
3235; Amycolatopsis sp. MJM2582 contig00007, whole
genome shotgun sequence; 739487309; NZ_JPLW01000007.1
3236; Sphingobium chlorophenolicum strain NBRC 16172
contig000025, whole genome shotgun sequence; 739594477;
NZ_JFHR01000025.1
3237; Sphingobium chlorophenolicum strain NBRC 16172
contig000062, whole genome shotgun sequence; 739598481; NZ_
JFHR01000062.1
3238; Sphingobium herbicidovorans NBRC 16415 contig000028,
whole genome shotgun sequence; 739610197; NZ_JFZA02000028.1
3239; Sphingobium sp. ba1 seq0028, whole genome shotgun
sequence; 739622900; NZ_JPPQ01000069.1
3240; Sphingobium sp. ba1 seq0028, whole genome shotgun
sequence; 739622900; NZ_JPPQ01000069.1
3241; Sphingomonas paucimobilis strain EPA505 contig000016,
whole genome shotgun sequence; 739629085; NZ_JFYY01000016.1
3242; Sphingobium japonicum BiD32, whole genome
shotgun sequence; 494022722; NZ_CAVK010000217.1
3243; Sphingobium yanoikuyae strain B1 scaffold1, whole
genome shotgun sequence; 739650776; NZ_KL662193.1
3244; Sphingobium yanoikuyae strain B1 scaffold28, whole
genome shotgun sequence; 739656825; NZ_KL662220.1
3245; Sphingopyxis sp. LC81 contig24, whole genome shotgun
sequence; 739659070; NZ_JNFD01000017.1
3246; Sphingobium yanoikuyae strain B1 contig000019, whole
genome shotgun sequence; 739665456; NZ_JGVR01000019.1
3247; Sphingomonas wittichii strain YR128 EX04DRAFT_
scaffold00050.50_C, whole genome shotgun sequence; 739674258;
NZ_JQMC01000050.1
3248; Sphingopyxis fiibergensis strain Kp5.2, complete
genome; 749188513; NZ_CP009122.1
3249; Sphingopyxis sp. LC363 contig30, whole genome
shotgun sequence; 739701660; NZ_JNFC01000024.1
3250; Sphingopyxis sp. LC363 contig36, whole genome
shotgun sequence; 739702045; NZ_JNFC01000030.1
3251; Sphingopyxis sp. LC363 contig5, whole genome
shotgun sequence; 739702995; NZ_JNFC01000045.1
3252; Spirillospora albida strain NRRL B-3350 contig1.1, whole
genome shotgun sequence; 663122276; NZ_JOFJ01000001.1
3253; Sphingomonas sp. UNC305MFCo15.2 BR78DRAFT_
scaffold00001.1_C, whole genome shotgun sequence; 659889283;
NZ_JOOE01000001.1
3254; Streptococcus salivarius strain NU10 contig_11, whole
genome shotgun sequence; 739748927; NZ_JJMT01000011.1
3255; Streptomyces katrae strain NRRL B-16271 contig33.1,
whole genome shotgun sequence; 663300513; NZ_
JNZY01000033.1
3256; Streptomyces avermitilis MA-4680 = NBRC 14893,
complete genome; 162960844, NC_003155.4
3257; Streptomyces avermitilis MA-4680 = NBRC 14893,
complete genome; 162960844; NC_003155.4
3258; Streptomyces aurantiacus JA 4570 Seq17, whole genome
shotgun sequence; 514916021; NZ_AOPZ01000017.1
3259; Streptomyces griseus subsp. griseus strain NRRL WC-3645
contig39.1, whole genome shotgun sequence; 739830131;
NZ_JOJE01000039.1
3260; Streptomyces griseus subsp. griseus strain NRRL
WC-3645 contig40.1, whole genome shotgun
sequence; 739830264; NZ_JOJE01000040.1
3261; Streptomyces aureocirculatus strain NRRL ISP-5386 contig11.1,
whole genome shotgun sequence; 664013282; NZ_JOAP01000011.1
3262; Streptomyces scabiei strain NCPPB 4086 scf_65433_365.1,
whole genome shotgun sequence; 739854483; NZ_KL997447.1
3263; Streptomyces sp. ATexAB-D23 B082DRAFT_scaffold_0.1,
whole genome shotgun sequence; 483975550; NZ_KB892001.1
3264; Streptomyces lavendulae strain Fujisawa #8006 contig417.1,
whole genome shotgun sequence; 662043624; NZ_JNXL01000469.1
3265; Streptomyces sp. DpondAA-B6 K379DRAFT_
scaffold00015.15_C, wholegenome shotgun sequence;
654993549; NZ_AZVE01000016.1
3266; Streptomyces sclerotialus strain NRRL B-2317 contig7.1,
whole genome shotgun sequence; 664034500; NZ_JODX01000007.1
3267; Streptomyces olindensis strain DAUFPE 5622 103, whole
genome shotgun sequence; 739918964; NZ_JJOH01000097.1
3268; Streptomyces pristinaespiralis ATCC 25486 chromosome,
whole genome shotgun sequence; 297189896; NZ_CM000950.1
3269; Streptomyces sp. CNH099 B121DRAFT_scaffold_
16.17_C, whole genome shotgun sequence; 654239557;
NZ_AZWL01000018.1
3270; Streptomyces sp. MspMP-M5 B073DRAFT_scaffold_
27.28, whole genome shotgun sequence; 483974021;
NZ_KB891893.1
3271; Streptomyces sp. NRRL S-1813 contig13.1, whole
genome shotgun sequence; 664466568; NZ_JOHB01000013.1
3272; Streptomyces sp. NRRL S-87 contig69.1, whole genome
shotgun sequence; 663169513; NZ_JO
3273; Streptomyces sp. PRh5 contig001, whole genome
shotgun sequence; 740097110; NZ_JABQ01000001.1
3274; Thioclava dalianensis strain DLFJ1-1 contig2, whole
genome shotgun sequence; 740220529; NZ_JHEH01000002.1
3275; Tolypothrix bouteillei VB521301 scaffold_1, whole
genome shotgun sequence; 910242069; NZ_JHEG02000048.1
3276; Thioclava indica strain DT23-4 contig29, whole genome
shotgun sequence; 740292158; NZ_AUNB01000028.1
3277; Streptomyces albulus strain NK660, complete genome;
754221033; NZ_CP007574.1
3278; Paenibacillus sp. FSL H7-0357, complete genome;
749299172; NZ_CP009241.1
3279; Paenibacillus stellifer strain DSM 14472, complete
genome; 753871514; NZ_CP009286.1
3280; Burkholderia pseudomallei 1258a Contig0089, whole
genome shotgun sequence; 418540998; NZ_AHJB01000089.1
3281; Burkholderia pseudomallei ABCPW 91 scaffold1, whole
genome shotgun sequence; 740941050; NZ_KN323016.1
3282; Burkholderia pseudomallei strain MSHR4018 scaffold2,
whole genome shotgun sequence; 740942724; NZ_KN323080.1
3283; Burkholderia pseudomallei MSHR1357 scaffold1, whole
genome shotgun sequence; 740944663; NZ_KN323054.1
3284; Burkholderia pseudomallei ABCPW 30 scaffold1, whole
genome shotgun sequence; 740947478; NZ_KN323024.1
3285; Burkholderia pseudomallei MSHR465J scaffold1, whole
genome shotgun sequence; 740992312; NZ_KN322994.1
3286; Burkholderia pseudomallei T5V32 Y025.contig-100_19,
whole genome shotgun sequence; 740951623; NZ_JQHT01000093.1
3287; Burkholderia pseudomallei MSHR2990 scaffold2, whole
genome shotgun sequence; 740957131; NZ_KN323051.1
3288; Burkholderia sp. ABCPW 111 X946.contig-100_0, whole
genome shotgun sequence; 740958729; NZ_JPWT01000001.1
3289; Burkholderia pseudomallei MSHR1000 scaffold1, whole
genome shotgun sequence; 740963677; NZ_KN323065.1
3290; Burkholderia pseudomallei strain BDM scaffold1, whole
genome shotgun sequence; 740964046; NZ_KN150935.1
3291; Burkholderia pseudomallei strain BEG scaffold1, whole
genome shotgun sequence; 740978899; NZ_KN150957.1
3292; Burkholderia pseudomallei strain BDZ scaffold40, whole
genome shotgun sequence; 740989169; NZ_KN150904.1
3293; Burkholderia pseudomallei MSHR4377 scaffold1, whole
genome shotgun sequence; 740998359; NZ_KN322996.1
3294; Burkholderia pseudomallei strain BGH scaffold1, whole
genome shotgun sequence; 741001323; NZ_KN150943.1
3295; Burkholderia pseudomallei MSHR7343 X962.contig-100_
14, whole genome shotgun sequence; 741003124;
NZ_JQDM01000047.1
3296; Burkholderia pseudomallei strain PFGE_B T6 scaffold1,
whole genome shotgun sequence; 741007242; NZ_KN150983.1
3297; Burkholderia pseudomallei MSHR3965 chromosome
1 sequence; 752520733; NZ_CP009153.1
3298; Burkholderia pseudomallei MSHR5492.X992.contig-100_
0, whole genome shotgun sequence; 741015160;
NZ_JQD001000001.1
3299; Burkholderia oklahomensis strain EO147 chromosome
1, complete sequence; 752612400; NZ_CP008726.1
3300; Burkholderia oklahomensis strain EO147 chromosome
1, complete sequence; 752612400; NZ_CP008726.1
3301; Cupriavidus sp. IDO NODE_7, whole genome
shotgun sequence; 742878908; NZ_JWMA01000006.1
3302; Cupriavidus sp. IDO NODE_7, whole genome
shotgun sequence; 742878908; NZ_JWMA01000006.1
3303; Escherichia coli strain EC2_3 Contig93, whole genome
shotgun sequence; 742921760; NZ_JWKL01000093.1
3304; Brevundimonas nasdae strain TPW30 Contig_11, whole
genome shotgun sequence; 746187486; NZ_JWSY01000011.1
3305; Brevundimonas nasdae strain TPW30 Contig_13, whole
genome shotgun sequence; 746187665; NZ_JWSY01000013.1
3306; Paenibacillus polymyxa strain DSM 365 Contig001, whole
genome shotgun sequence; 746220937; NZ_JMIQ01000001.1
3307; Paenibacillus polymyxa strain CF05 genome; 746228615;
NZ_CP009909.1
3308; Novosphingobium malaysiense strain MUSC 273 Contig 11,
whole genome shotgun sequence; 746242072; NZ_,
JTDI01000011.1
3309; Paenibacillus sp. IHB B 3415 contig_069, whole
genome shotgun sequence; 746258261; NZ_JUEI01000069.1
3310; Novosphingobium subtenaneum strain DSM 12447 NJ75_
contig000013, whole genome shotgun sequence; 746288194;
NZ_JRVC01000013.1
3311; Pandoraea sputorum strain DSM 21091, complete
genome; 749204399; NZ_CP010431.1
3312; Xanthomonas cannabis pv. cannabis strain NCPPB 3753
contig_67, whole genome shotgun sequence; 746366822;
NZ_JSZF01000067.1
3313; Xanthomonas arboricola pv. pruni MAFF 301420 strain
MAFF301420, whole genome shotgun sequence; 759376814;
NZ_BAVC01000017.1
3314; Xanthomonas arboricola pv. celebensis strain
NCPPB 1630 scf 4910810.1, whole genome shotgun
sequence; 746486416; NZ_KL638873.1
3315; Xanthomonas arboricola pv. celebensis strain NCPPB
1832 scf 23466_141.1, whole genome shotgun sequence;
746494072; NZ_KL638866.1
3316; Xanthomonas cannabis pv. cannabis strain NCPPB
2877 contig_94, whole genome shotgun sequence;
746532813; NZ_JSZE01000094.1
3317; Sphingopyxis fribergensis strain Kp5.2, complete
genome; 749188513; NZ_CP009122.1
3318; Sphingopyxis fribergensis strain Kp5.2, complete
genome; 749188513; NZ_CP009122.1
3319; Sphingopyxis fribergensis strain Kp5.2, complete
genome; 749188513; NZ_CP009122.1
3320; Xanthomonas phaseoli pv. phaseoli strain NCPPB 557
scf 22337_104.contig_l, whole genome shotgun sequence;
821373081; NZ_JWTE02000036.1
3321; Corynebacterium minutissimum strain ATCC 23348
Ordered_Contig_015, whole genome shotgun sequence;
746717390; NZ_JSEF01000015.1
3322; Hassallia byssoidea VB512170 scaffold_0, whole
genome shotgun sequence; 748181452; NZ_JTCM01000043.1
3323; Xanthomonas arboricola pv. corylina str. NCCB 100457
Contig50, whole genome shotgun sequence; 507418017;
NZ_APMC02000050.1
3324; Paenibacillus sonchi X19-5 S5_contig01138, whole
genome shotgun sequence; 484099183; NZ_AJTY01001072.1
3325; Pedobacter sp. BAL39 1103467000492, whole genome
shotgun sequence; 149277373; NZ_ABCM01000005.1
3326; Paenibacillus sp. FSL R7-0273, complete genome;
749302091; NZ_CP009283.1
3327; Amycolatopsis decaplanina DSM 44594 Contig0055, whole
genome shotgun sequence; 458848256; NZ_AOHO01000055.1
3328; Rhodanobacter thiooxydans LCS2 contig057, whole
genome shotgun sequence; 389809081; NZ_AJXW01000057.1
3329; Bacillus sp. REN51N contig 2, whole genome shotgun
sequence; 748816024; NZ_JXAB01000002.1
3330; Paenibacillus polymyxa strain Sb3-1, complete genome;
749204146; NZ_CP010268.1
3331; Citrobacter pasteurii strain CIP 55.13, whole genome
shotgun sequence; 749611130; NZ_CDHL01000044.1
3332; Klebsiella pneumoniae CCHB01000016, whole genome
shotgun sequence; 749639368; NZ_CCHB01000016.1
3333; Streptomonospora alba strain YIM 90003 contig 9, whole
genome shotgun sequence; 749673329; NZ_JR0001000009.1
3334; Actinobaculum sp. oral taxon 183 str. F0552 Scaffold1,
whole genome shotgun sequence; 545327174; NZ_KE951406.1
3335; Actinobaculum sp. oral taxon 183 str. F0552 Scaffold15,
whole genome shotgun sequence; 545327527; NZ_KE951412.1
3336; Rubidibacter lacunae KORDI 51-2 KR5 l_contig00121,
whole genome shotgun sequence; 550281965;
NZ_ASSJ01000070.1
3337; Nocardiopsis chromatogenes YIM 90109 contig_93,
whole genome shotgun sequence; 484026206;
NZ_ANBH01000093.1
3338; Streptomyces auratus AGR0001 Scaffoldl, whole
genome shotgun sequence; 398790069; NZ_JH725387.1
3339; Gorillibacterium massiliense strain G5, whole genome
shotgun sequence; 750677319; NZ_CBQR020000171.1
3340; Mesorhizobium sp. 0RS3324, whole genome shotgun
sequence; 751265275; NZ_CCMY01000220.1
3341; Mesorhizobium plurifarium, whole genome shotgun
sequence; 751280166; NZ_CCNB01000034.1
3342; Mesorhizobium sp. SOD10, whole genome shotgun
sequence; 751285871; NZ_CCNA01000001.1
3343; Mesorhizobium plurifarium, whole genome shotgun
sequence; 751292755; NZ_CCNE01000004.1
3344; Mesorhizobium plurifarium, whole genome shotgun
sequence; 751299847; NZ_CCMZ01000015.1
3345; Tolypothrix campylonemoides VB511288 scaffold_0,
whole genome shotgun sequence; 751565075;
NZ_JXCB01000004.1
3346; Jeotgalibacillus campisalis strain SF-57 contig00001,
whole genome shotgun sequence; 751586078;
NZ_ARR01000001.1
3347; Cohnella kolymensis strain VKM B-2846 B2846_22,
whole genome shotgun sequence; 751596254;
NZ_JXAL01000022.1
3348; Jeotgalibacillus soli strain P9 contig00009, whole
genome shotgun sequence; 751619763; NZ_JXRP01000009.1
3349; Burkholderia pseudomallei MSHR4000 scaffold1, whole
genome shotgun sequence; 752517538; NZ_KN323041.1
3350; Burkholderia pseudomallei MSHR4303 scaffold1, whole
genome shotgun sequence; 752519380; NZ_KN323039.1
3351; Burkholderia pseudomallei MSHR4300 scaffold1, whole
genome shotgun sequence; 752522535; NZ_KN322998.1
3352; Burkholderia pseudomallei MSHR4032 scaffold1, whole
genome shotgun sequence; 752526735; NZ_KN323008.1
3353; Geobacter uraniireducens Rf4, complete genome;
148262085; NC_009483.1
3354; Saccharothrix espanaensis DSM 44229 complete
genome; 433601838; NC_019673.1
3355; Mycobacterium sinense strain JDM601, complete
genome; 333988640; NC_015576.1
3356; Sphingomonas wittichii RW1, complete genome;
148552929; NC_009511.1
3357; Sphingopyxis alaskensis RB2256, complete genome;
103485498; NC_008048.1
3358; Sphingopyxis alaskensis RB2256, complete genome;
103485498; NC_008048.1
3359; Synechococcus sp. PCC 6312, complete genome;
427711179; NC_019680.1
3360; Caulobacter sp. K31, complete genome; 167643973;
NC_010338.1
3361; Tistrella mobilis KA081020-065 plasmid pTM1,
complete sequence; 442559580; NC_017957.2
3362; Stackebrandtia nassauensis DSM 44728, complete
genome; 291297538; NC_013947.1
3363; Magnetospirillum gryphiswaldense MSR-1 v2,
complete genome; 568144401; NC_023065.1
3364; Asticcacaulis excentricus CB 48 chromosome 1,
complete sequence; 315497051; NC_014816.1
3365; Emticicia oligotrophica DSM 17448, complete genome;
408671769; NC_018748.1
3366; Clostridium beijerinckii strain NCIMB 14988 genome;
754484184; NZ_CP010086.1
3367; Desulfocapsa sulfexigens DSM 10523, complete
genome; 451945650; NC_020304.1
3368; Gallionella capsifeniformans ES-2, complete genome;
302877245; NC_014394.1
3369; Paenibacillus sp. FSL P4-0081, complete genome;
754777894; NZ_CP009280.1
3370; Streptomyces sp. NBRC 110027, whole genome shotgun
sequence; 754788309; NZ_BBNO01000002.1
3371; Streptomyces sp. NBRC 110027, whole genome shotgun
sequence; 754796661; NZ_BBNO01000008.1
3372; Paenibacillus sp. FSL R7-0331, complete genome;
754821094; NZ_CP009284.1
3373; Paenibacillus camerounensis strain G4, whole genome
shotgun sequence; 754841195; NZ_CCDG010000069.1
3374; Paenibacillus borealis strain DSM 13188, complete
genome; 754859657; NZ_CP009285.1
3375; Paenibacillus sp. FSL R5-0912, complete genome;
754884871; NZ_CP009282.1
3376; Legionella pneumophila serogroup 1 strain TUM 13948,
whole genome shotgun sequence; 754875479; NZ_
BAYQ01000013.1
3377; Nocardiopsis sp. TP-A0876 strain NBRC 110039, whole
genome shotgun sequence; 754924215; NZ_BAZE01000001.1
3378; Streptacidiphilus neutrinimicus strain NBRC 100921,
whole genome shotgun sequence; 755016073;
NZ_BBP001000030.1
3379; Sanguibacter keddieii DSM 10542, complete genome;
269793358; NC_013521.1
3380; Streptacidiphilus jiangxiensis strain NBRC 100920, whole
genome shotgun sequence; 755108320; NZ_BBPN01000056.1
3381; Mesorhizobium sp. ORS3359, whole genome shotgun
sequence; 756828038; NZ_CCNC01000143.1
3382; Streptomyces rimosus strain R6-500MV9-R8 contig021,
whole genome shotgun sequence; 757577710;
NZ_JMGY01000021.1
3383; Burkholderia pseudomallei Bp22 chromosome I, whole
genome shotgun sequence; 485065055; NZ_CM001156.1
3384; Bacillus mycoides strain BHP DJ93.Contig42, whole
genome shotgun sequence; 757763573; NZ_JMQC01000008.1
3385; Aneurinibacillus migulanus strain NCTC 7096 contig_153,
whole genome shotgun sequence; 759007555; NZ_
JYBO01000079.1
3386; Xanthomonas arboricola pv. pruni strain Xap33 contig_
176, whole genome shotgun sequence; 759358038; NZ_
JHUQ01000175.1
3387; Sphingobium sp. Ant17 Contig_45, whole genome
shotgun sequence; 759429528; NZ_JEMV01000036.1
3388; Sphingobium sp. Ant17 Contig_90, whole genome
shotgun sequence; 759431957; NZ_JEMV01000094.1
3389; Bifidobacterium callitrichos DSM 23973 contig4, whole
genome shotgun sequence; 759443001; NZ_JDUV01000004.1
3390; Streptomyces sp. NRRL F-5123 contig24.1, whole
genome shotgun sequence; 671535174; NZ_JOHY01000024.1
3391; Streptomyces vinaceus strain NRRL ISP-5257
contig5.1, whole genome shotgun sequence; 759527818;
NZ_JNYP01000005.1
3392; Burkholderia pseudomallei MSHR1153 chromosome 1,
complete sequence; 759555751; NZ_CP009271.1
3393; Burkholderia thailandensis MSMB43 Scaffold3, whole
genome shotgun sequence; 424903876; NZ_JH692063.1
3394; Pseudomonas sp. HMP271 Pseudomonas HMP271_
contig_7, whole genome shotgun sequence; 759578528;
NZ_JMFZ01000007.1
3395; Stenotrophomonas maltophilia strain B418 Contig_4_,
whole genome shotgun sequence; 759679095; NZ_
JSXG01000004.1
3396; Kitasatospora sp. MBT66 scaffold3, whole genome
shotgun sequence; 759755931; NZ_JAIY01000003.1
3397; Streptomyces bingchenggensis BCW-1, complete
genome; 374982757; NC_016582.1
3398; Streptomyces glaucescens strain GLA.0, complete
genome; 759802587; NZ_CP009438.1
3399; Streptomyces glaucescens strain GLA.0, complete
genome; 759802587; NZ_CP009438.1
3400; Actinomyces israelii DSM 43320 O145DRAFT_
scaffold00014.14_C, whole genome shotgun sequence;
759875025; NZ_JONS01000016.1
3401; Rubrivivax gelatinosus IL144 DNA, complete genome;
383755859; NC_017075.1
3402; Clostridium butyricum strain HM-68 Contig83, whole
genome shotgun sequence; 760273878; NZ_JXBT01000001.1
3403; Novosphingobium sp. P6W scaffold3, whole genome
shotgun sequence; 763092879; NZ_JXZE01000003.1
3404; Streptomyces fulvissimus DSM 40593, complete
genome; 488607535; NC_021177.1
3405; Novosphingobium sp. P6W scaffold9, whole genome
shotgun sequence; 763095630; NZ_JXZE01000009.1
3406; Bifidobacterium reuteri DSM 23975 contig4, whole
genome shotgun sequence; 763216595; NZ_JDUW01000004.1
3407; Sphingomonas hengshuiensis strain WHSC-8, complete
genome; 764364074; NZ_CP010836.1
3408; Sphingomonas hengshuiensis strain WHSC-8, complete
genome; 764364074; NZ_CP010836.1
3409; Burkholderia pseudomallei strain QCMRI_BP13 Contig 7,
whole genome shotgun sequence; 764427571; NZ_JYBH01000021.1
3410; Streptomyces natalensis ATCC 27448 Scaffold_33, whole
genome shotgun sequence; 764439507; NZ_JRKI01000027.1
3411; Streptomyces griseus strain S4-7 contig113, whole
genome shotgun sequence; 764464761; NZ_JYBE01000113.1
3412; Streptomyces cyaneogriseus subsp. noncyanogenus strain
NMWT 1, complete genome; 764487836; NZ_CP010849.1
3413; Bacillus subtilis subsp. spizizenii RFWG1A4 contig00010,
whole genome shotgun sequence; 764657375; NZ_AJHM01000010.1
3414; Mastigocladus laminosus UU774 scaffold_22, whole
genome shotgun sequence; 764671177; NZ_JX1101000139.1
3415; Bacillus subtilis subsp. spizizenii RFWG5B15 contig00010,
whole genome shotgun sequence; 764677272; NZ_AJHO01000010.1
3416; Streptomyces iranensis genome assembly Siranensis,
scaffold SCAF00002; 765016627; NZ_LK022849.1
3417; Risungbinella massiliensis strain GD1, whole genome
shotgun sequence; 765315585; NZ_LN812103.1
3418; Risungbinella massiliensis strain GD1, whole genome
shotgun sequence; 765315585; NZ_LN812103.1
3419; Paenibacillus tenae strain NRRL B-30644 contig00007,
whole genome shotgun sequence; 765319397; NZ_JTHP01000007.1
3420; Sphingobium sp. YBL2, complete genome; 765344939;
NZ_CP010954.1
3421; Sphingobium sp. YBL2, complete genome; 765344939;
NZ_CP010954.1
3422; Streptococcus suis strain LS5J, whole genome
shotgun sequence; 765394696; NZ_CEEZ01000028.1
3423; Bacillus mycoides strain 11kri323 LG56_082, whole
genome shotgun sequence; 765533368; NZ_JYCJ01000082.1
3424; Streptococcus suis strain LS8F, whole genome shotgun
sequence; 766589647; NZ_CEHJ01000007.1
3425; Streptococcus suis strain L58I, whole genome shotgun
sequence; 766595491; NZ_CEHM01000004.1
3426; Paenibacillus polymyxa strain NRRL B-30509 contig00003,
whole genome shotgun sequence; 766607514; NZ_JTHO01000003.1
3427; Thalassospira sp. HJNODE_2, whole genome shotgun
sequence; 766668420; NZ_JYII01000010.1
3428; Paenibacillus sp. IHBB 10380, complete genome;
767005659; NZ_CP010976.1
3429; Frankia sp. CpI1-S FF36_scaffold_9.10, whole genome
shotgun sequence; 768715243; NZ_JYFN01000010.1
3430; Streptococcus suis strain B28P, whole genome shotgun
sequence; 769231516; NZ_CDTB01000010.1
3431; Lechevalieria aerocolonigenes strain NRRL B-16140
contig11.3, whole genome shotgun sequence; 772744565;
NZ_JYJG01000059.1
3432; Streptomyces sp. NRRL F-4428 contig40.2, whole genome
shotgun sequence; 772774737; NZ_JYJI01000131.1
3433; Bacterium endosymbiont of Mortierella elongata FMR23-6,
whole genome shotgun sequence; 779889750; NZ_DF850521.1
3434; Bacterium endosymbiont of Mortierella elongata FMR23-6,
whole genome shotgun sequence; 779889750; NZ_DF850521.1
3435; Streptomyces sp. FxanaA7 F611DRAFT_scaffold00041.41_
C, whole genome shotgun sequence; 780340655;
NZ_LACL01000054.1
3436; Burkholderia oklahomensis C6786 chromosome I,
complete sequence; 780352952; NZ_CP009555.1
3437; Burkholderia pseudomallei MSHR2543 chromosome I,
complete sequence; 782642065; NZ_CP009478.1
3438; Burkholderia thailandensis 34 chromosome 1, complete
sequence; 782674607; NZ_CP010017.1
3439; Streptomyces rubellomurinus strain ATCC 31215 contig-63,
whole genome shotgun sequence; 783211546;
3440; Burkholderia pseudomallei strain MSHR5107 Contig_3,
whole genome shotgun sequence; 785595141; NZ_JZXP01000013.1
3441; Elstera litoralis strain Dia-1 c21, whole genome shotgun
sequence; 788026242; NZ_LAJY01000021.1
3442; Frankia sp. DC12 FraDC12DRAFT_scaffold1.1, whole
genome shotgun sequence; 797224947; NZ_KQ031391.1
3443; Sphingomonas sp. SRS2 contig40, whole genome shotgun
sequence; 806905234; NZ_LARW01000040.1
3444; Bacillus sp. UMTAT18 contig000011, whole genome
shotgun sequence; 806951735; NZ_JSFD01000011.1
3445; Paenibacillus wulumuqiensis strain Y24 Scaffold4, whole
genome shotgun sequence; 808051893; NZ_KQ040793.1
3446; Bacillus endophyticus strain Hbe603, complete genome;
890672806; NZ_CP011974.1
3447; Paenibacillus algorifonticola strain XJ259 Scaffold20_1,
whole genome shotgun sequence; 808072221; NZ_LAQ001000025.1
3448; Streptomyces sp. MBT28 contig_50, whole genome
shotgun sequence; 808090008; NZ_LARV01000050.1
3449; Mycobacterium sp. UM_Kg27 contig000002, whole
genome shotgun sequence; 809025315; NZ_JRMM01000002.1
3450; Mycobacterium sp. UM_Kg1 contig000164, whole
genome shotgun sequence; 809073490; NZ_JRMK01000164.1
3451; Xanthomonas campesiiis strain 17, complete genome;
810489403; NZ_CP011256.1
3452; Spirosoma radiotolerans strain DG5A, complete genome;
817524426; NZ_CP010429.1
3453; Allosalinactinospora lopnorensis strain CA15-2 contig00044,
whole genome shotgun sequence; 815863894; NZ_LAJC01000044.1
3454; Bacillus sp. SA1-12 scf7180000003378, whole genome
shotgun sequence; 817541164; NZ_LATZ01000026.1
3455; Streptomyces xiamenensis strain 318, complete genome;
921170702; NZ_CP009922.2
3456; Streptomyces xiamenensis strain 318, complete genome;
921170702; NZ_CP009922.2
3457; Altererythrobacter atlanticus strain 26DY36, complete
genome; 927872504; NZ_JZKH01000064.1 NZ_CP011452.2
3458; Streptomyces lydicus A02, complete genome; 822214995;
NZ_CP007699.1
3459; Streptomyces lydicus A02, complete genome; 822214995;
NZ_CP007699.1
3460; Streptomyces lydicus A02, complete genome; 822214995;
NZ_CP007699.1
3461; Bacillus cereus strain B4147 NODES, whole genome
shotgun sequence; 822530609; NZ_LCYN01000004.1
3462; Xanthomonas pisi DSM 18956 Contig_28, whole
genome shotgun sequence; 822535978; NZ_JPLE01000028.1
3463; Erythrobacter luteus strain KA37 contig 1, whole genome
shotgun sequence; 822631216; NZ_LBHB01000001.1
3464; Erythrobacter marinus strain KCTC 23554
KCTC23554_C3, whole genome shotgun sequence; 829088381;
NZ_LDCP01000003.1
3465; Streptomyces leeuwenhoekii strain C34(2013) c34_
sequence_0041, whole genome shotgun sequence;
657295264; NZ_AZSD01000040.1
3466; Streptomyces leeuwenhoekii strain C34(2013) c34_
sequence_0012, whole genome shotgun sequence;
657294764; NZ_AZSD01000012.1
3467; Xanthomonas arboricola strain CFBP 7634 Xaijug-
CFBP7634-G11, whole genome shotgun sequence;
825139250; NZ_JZEH01000001.1
3468; Xanthomonas arboricola strain CFBP 7651 Xaijug-
CFBP7651-G11, whole genome shotgun
sequence; 825156557; NZ_JZEI01000001.1
3469; Luteimonas sp. FCS-9 scf7180000000225, whole
genome shotgun sequence; 825314716; NZ_LASZ01000002.1
3470; Luteimonas sp. FCS-9 scf7180000000226, whole
genome shotgun sequence; 825314728; NZ_LASZ01000003.1
3471; Streptomyces sp. KE1 Contigll, whole genome
shotgun sequence; 825353621; NZ_LAYX01000011.1
3472; Frankia coriariae strain BMG5.1 scaffold41.42, whole
genome shotgun sequence; 827465632; NZ__MO01000042.1
3473; Erythrobacter marinus strain KCTC 23554 KCTC23554_C3,
whole genome shotgun sequence; 829088381;
NZ_LDCP01000003.1
3474; Alistipes sp. ZOR0009 L990_140, whole genome
shotgun sequence; 835319962; NZ_JTLD01000119.1
3475; Streptomyces sp. M10 Scaffold2, whole genome
shotgun sequence; 835355240; NZ_KN549147.1
3476; Bacillus aryabhattai strain T61 Scaffold1, whole
genome shotgun sequence; 836596561; NZ_KQ087173.1
3477; Croceicoccus naphthovorans strain PQ-2, complete
genome; 836676868; NZ_CP011770.1
3478; Paenibacillus sp. TCA20, whole genome shotgun sequence;
843088522; NZ_BBIW01000001.1
3479; Bacillus circulans strain RIT379 contig11, whole genome
shotgun sequence; 844809159; NZ_LDPH01000011.1
3480; Omithinibacillus califomiensis strain DSM 16628 contig_22,
whole genome shotgun sequence; 849059098; NZ_LDUE01000022.1
3481; Bacillus pseudalcaliphilus strain DSM 8725 super11, whole
genome shotgun sequence; 849078078; NZ_LFJO01000006.1
3482; Bacillus aryabhattai strain LK25 16, whole genome
shotgun sequence; 850356871; NZ_LDWN01000016.1
3483; Methanobacterium sp. SMA-27 DL91DRAFT_unitig_0_
quiver. l_C, whole genome shotgun sequence; 851351157;
NZ_JQLY01000001.1
3484; Cellulomonas sp. A375-1 contig_129, whole genome
shotgun sequence; 856992287; NZ_LFKW01000127.1
3485; Bacillus cereus strain RIMV BC 126 212, whole genome
shotgun sequence; 872696015; NZ_LABO01000035.1
3486; Streptomyces leeuwenhoekii strain C58 contig69, whole
genome shotgun sequence; 873282617; NZ_LFEH01000068.1
3487; Streptomyces leeuwenhoekii strain C58 contig126, whole
genome shotgun sequence; 873282818; NZ_LFEH01000123.1
3488; Sphingomonas sp. MEA3-1 contig00021, whole genome
shotgun sequence; 873296042; NZ_LECE01000021.1
3489; Sphingomonas sp. MEA3-1 contig00040, whole genome
shotgun sequence; 873296160; NZ_LECE01000040.1
3490; Sphingomonas sp. MEA3-1 contig00071, whole genome
shotgun sequence; 873296295; NZ_LECE01000071.1
3491; Bacillus sp. 220_BSPC 1447_75439_1072255, whole
genome shotgun sequence; 880954155; NZ_JVPL01000109.1
3492; Bacillus sp. 522_BSPC 2470_72498_1083579_
594__ . . . _522_, whole genome shotgun sequence; 880997761;
NZ_JVDT01000118.1
3493; Nostoc sp. PCC 7107, complete genome; 427705465;
NC_019676.1
3494; Streptomyces decoyicus strain NRRL ISP-5087 P056_
Doro1_scaffold78, whole genome shotgun sequence;
662133033; NZ_KL570321.1
3495; Streptomyces varsoviensis strain NRRL B-3589 contig2.1,
whole genome shotgun sequence; 664348063; NZ_JOFN01000002.1
3496; Scytonema tolypothrichoides VB-61278 scaffold_6, whole
genome shotgun sequence; 890002594; NZ_JXCA01000005.1
3497; Erythrobacter atlanticus strain s21-N3, complete genome;
890444402; NZ_CP011310.1
3498; Sphingobium yanoikuyae strain SHJ scaffold2, whole
genome shotgun sequence; 893711333; NZ_KQ235984.1
3499; Sphingobium yanoikuyae strain SHJ scaffold12, whole
genome shotgun sequence; 893711343; NZ_KQ235994.1
3500; Sphingobium yanoikuyae strain SHJ scaffold33, whole
genome shotgun sequence; 893711364; NZ_KQ236015.1
3501; Sphingobium yanoikuyae strain SHJ scaffold47, whole
genome shotgun sequence; 893711378; NZ_KQ236029.1
3502; Stenotrophomonas maltophilia strain 544_SMAL
1161_223966_2976806_599__ . . . _882_, whole genome shotgun
sequence; 896492362; NZ_JVCU01000107.1
3503; Stenotrophomonas maltophilia strain 517_SMAL
472_405557_4951990_20_ . . . _115_, whole genome shotgun
sequence; 896506125; NZ_JVDZ01000045.1
3504; Stenotrophomonas maltophilia strain 131_SMAL
1126_236170_8501292_717__ . . . _1018_, whole genome shotgun
sequence; 896520167; NZ_JVUI01000038.1
3505; Stenotrophomonas maltophilia strain 419_SMAL
707_128228_1961615_4__642__523_, whole genome shotgun
sequence; 896535166; NZ_JVHW01000017.1
3506; Stenotrophomonas maltophilia strain 179_SMAL
631_468538_7028045_522__ . . . _127_, whole genome shotgun
sequence; 896555871; NZ_JVRD01000056.1
3507; Stenotrophomonas maltophilia strain 951_SMAL 71_
125859_2268311, whole genome shotgun sequence; 896567682;
NZ_JUMH01000022.1
3508; Stenotrophomonas maltophilia strain 22_SMAL
361_494818_13518495_244__194__203_, whole genome shotgun
sequence; 896599318; NZ_JVPM01000019.1
3509; Streptococcus pseudopneumoniae strain 445_SPSE
347_91401_2272315_318__ . . . _319_, whole genome shotgun
sequence; 896667361; NZ_JVGV01000030.1
3510; Streptomyces sp. SBT349 scaffold307_size9018, whole
genome shotgun sequence; 898301838; NZ_LAVK01000307.1
3511; Kitasatospora sp. MY 5-36 Contig_703_, whole genome
shotgun sequence; 902792184; NZ_LFVW01000692.1
3512; Streptomyces caatingaensis strain CMAA 1322 contig02,
whole genome shotgun sequence; 906344334; NZ_LFXA01000002.1
3513; Streptomyces caatingaensis strain CMAA 1322 contig02,
whole genome shotgun sequence; 906344334; NZ_LFXA01000002.1
3514; Streptomyces caatingaensis strain CMAA 1322 contig07,
whole genome shotgun sequence; 906344339; NZ_LFXA01000007.1
3515; Streptomyces caatingaensis strain CMAA 1322 contig09,
whole genome shotgun sequence; 906344341; NZ_LFXA01000009.1
3516; Xanthomonas arboricola 3004 contig00003, whole genome
shotgun sequence; 640500871; NZ_AZQY01000003.1
3517; Candidatus Halobonum tynellensis G22 contig00002, whole
genome shotgun sequence; 557371823; NZ_ASGZ01000002.1
3518; Streptomyces wadayamensis strain A23 LGO_A23_A57_
CO0257, whole genome shotgun sequence; 910050821;
NZ_JHDU01000034.1
3519; Bacillus weihenstephanensis strain JAS 83/3 Bw_
JAS-83/3_contig00005, whole genome shotgun sequence;
910095435; NZ_JNLY01000005.1
3520; Silvibacterium bohemicum strain S15 contig_3, whole
genome shotgun sequence; 910257956; NZ_LBHJ01000003.1
3521; Silvibacterium bohemicum strain S15 contig_3, whole
genome shotgun sequence; 910257956; NZ_LBHJ01000003.1
3522; Silvibacterium bohemicum strain S15 contig_30, whole
genome shotgun sequence; 910257973; NZ_LBHJ01000020.1
3523; Streptococcus pneumoniae strain 37, whole genome
shotgun sequence; 912648153; NZ_CKHR01000004.1
3524; Streptococcus pneumoniae strain 37, whole genome
shotgun sequence; 912676034; NZ_CMPZ01000004.1
3525; Streptomyces fradiae strain ATCC 19609 contig0008,
whole genome shotgun sequence; 759752221; NZ_JNAD01000008.1
3526; Streptomyces sp. CNS654 CD02DRAFT_
scaffold00023.23S, whole genome shotgun sequence; 695856316;
NZ_JNLT01000024.1
3527; Streptomyces griseus subsp. rhodochrous strain NRRL
B-2931 contig3.1, whole genome shotgun sequence; 664191782;
NZ_JOFE01000003.1
3528; Streptomyces sp. NRRL F-2202 contig25.1, whole
genome shotgun sequence; 695860443; NZ_JOIH01000025.1
3529; Streptomyces puipeochromogenes strain NRRL B-3012
contig5.1, whole genome shotgun sequence; 663242068;
NZ_JODK01000005.1
3530; Streptomyces griseus subsp. rhodochrous strain NRRL
B-2932 contig37.1, whole genome shotgun sequence; 664207653;
NZ_JOFF01000037.1
3531; Streptomyces sp. NRRL F-5702 contig3.1, whole
genome shotgun sequence; 664537198; NZ_JOHD01000003.1
3532; Streptomyces albus subsp. albus strain NRRL B-2445
contig1.1, whole genome shotgun sequence; 664084661;
NZ_JOED01000001.1
3533; Streptomyces baamensis strain NRRL B-2842 P144_
Doro1_scaffold6, whole genome shotgun sequence; 662129456;
NZ_KL573544.1
3534; Streptomyces sp. NRRL F-3218 contig19.1, whole
genome shotgun sequence; 664170107; NZ_JOIP01000019.1
3535; Streptomyces albus subsp. albus strain NRRL B-2445
contig1.1, whole genome shotgun sequence; 664084661;
NZ_JOED01000001.1
3536; Streptomyces albus subsp. albus strain NRRL B-16041
contig26.1, whole genome shotgun sequence; 695869320;
NZ_JNWW01000026.1
3537; Streptomyces albus subsp. albus strain NRRL B-16041
contig28.1, whole genome shotgun sequence; 695870063;
NZ_JNWW01000028.1
3538; Streptomyces peucetius strain NRRL WC-3868 contig49.1,
whole genome shotgun sequence; 665671804; NZ_JOCK01000052.1
3539; Erythrobacter citreus LAMA 915 Contig13, whole
genome shotgun sequence; 914607448; NZ_JYNE01000028.1
3540; Bacillus flexus strain Riq5 contig_32, whole genome
shotgun sequence; 914730676; NZ_LFQJ01000032.1
3541; Xylanimonas cellulosilytica DSM 15894, complete
genome; 269954810; NC_013530.1
3542; Streptomyces sp. Mg1, complete genome; 847063800;
NZ_CP011664.1
3543; Streptomyces sviceus ATCC 29083 chromosome, whole
genome shotgun sequence; 297196766; NZ_CM000951.1
3544; Burkholderia pseudomallei strain MSHR0169 Contig_2,
whole genome shotgun sequence; 915621003; NZ_LGKL01000002.1
3545; Burkholderia pseudomallei strain E25, whole genome
shotgun sequence; 915671105; NZ_CSLP01000001.1
3546; Streptomyces xinghaiensis S187 contig_1763_1, whole
genome shotgun sequence; 485454803; NZ_AFRP01001656.1
3547; Streptomyces sp. W007 contig00241, whole genome
shotgun sequence; 365866490; NZ_AGSW01000226.1
3548; Streptomyces violaceusniger Tu 4113, complete genome;
345007964; NC_015957.1
3549; Streptomyces mobaraensis NBRC 13819 = DSM
40847 contig024, whole genome shotgun sequence; 458977979;
NZ_AORZ01000024.1
3550; Streptomyces mobaraensis NBRC 13819 = DSM 40847
contig079, whole genome shotgun sequence;
458984960; NZ_AORZ01000079.1
3551; Actinokineospora enzanensis DSM 44649 C503DRAFT_
scaffold00014.14, whole genome shotgun sequence;
484005069; NZ_KB894416.1
3552; Streptomyces sp. FXJ7.023 Contig10, whole genome
shotgun sequence; 510871397; NZ_APIV01000010.1
3553; Nocardia transvalensis NBRC 15921, whole genome
shotgun sequence; 485125031; NZ_BAGL01000055.1
3554; Caulobacter sp. URHA0033 H963DRAFT_
scaffold00023.23_C, whole genome shotgun sequence; 654573246;
NZ_AUEO01000025.1
3555; Gloeobacter kilaueensis JS1, complete genome;
554634310; NC_022600.1
3556; Actinomadura oligospora ATCC 43269
P696DRAFT_scaffold00008.8_C, whole genome shotgun sequence;
651281457; NZ_JADG01000010.1
3557; Actinomadura oligospora ATCC 43269
P696DRAFT_scaffold00008.8_C, whole genome shotgun sequence;
651281457; NZ_JADG01000010.1
3558; Streptomyces sp. Tu 6176 scaffold00003, whole genome
shotgun sequence; 740044478; NZ_KK106990.1
3559; Sphingomonas paucimobilis strain EPA505 contig000027,
whole genome shotgun sequence; 739630357; NZ_JFYY01000027.1
3560; Paenibacillus sp. UNC217MF BP95DRAFT_
scaffold00011.11_C, whole genome shotgun sequence;
655084059; NZ_JMLT01000016.1
3561; Hyphomonas chukchiensis strain BH-BN04-4 contig29,
whole genome shotgun sequence; 736736050; NZ_AWFG01000029.1
3562; Fusobacterium necrophorum BFTR-2 contig0075, whole
genome shotgun sequence; 737951550; NZ_JAAG01000075.1
3563; Streptomyces sp. NRRL F-5917 contig68.1, whole genome
shotgun sequence; 663414324; NZ_JOHQ01000068.1
3564; Streptomyces sp. NRRL F-5639 contig31.1, whole genome
shotgun sequence; 664512262; NZ_JOGK01000031.1
3565; Streptomyces sp. NRRL F-5639 contig75.1, whole genome
shotgun sequence; 664515060; NZ_JOGK01000075.1
3566; Streptomyces megasporus strain NRRL B-16372 contig19.1,
whole genome shotgun sequence; 671525382; NZ_JODL01000019.1
3567; Streptomyces albus subsp. albus strain NRRL B-1811 contig32.1,
whole genome shotgun sequence; 665618015; NZ_JODR01000032.1
3568; Streptomyces albus subsp. albus strain NRRL B-1811 contig49.1,
whole genome shotgun sequence; 665618560; NZ_JODR01000049.1
3569; Streptomyces griseus subsp. griseus strain NRRL WC-3480
contig2.1, whole genome shotgun sequence; 664166765;
NZ_JOBR01000002.1
3570; Streptomyces griseorubens strain JSD-1 scaffold1, whole
genome shotgun sequence; 739792456; NZ_KL503830.1
3571; Streptomyces achromogenes subsp. achromogenes strain
NRRL B-2120 contig2.1, whole genome shotgun sequence;
664063830; NZ_JODT01000002.1
3572; Nocardia sp. NRRL WC-3656 contig2.1, whole genome
shotgun sequence; 663737675; NZ_JOJF01000002.1
3573; Streptomyces sp. NRRL S-337 contig31.1, whole genome
shotgun sequence; 664275807; NZ_JOIX01000031.1
3574; Streptomyces sp. NRRL S-337 contig41.1, whole genome
shotgun sequence; 664277815; NZ_JOIX01000041.1
3575; Streptomyces albus subsp. albus strain NRRL B-2362 contig48.1,
whole genome shotgun sequence; 739761647; NZ_JODZ01000048.1
3576; Streptomyces ruber strain NRRL ISP-5378 contig2.1, whole
genome shotgun sequence; 665674644; NZ_JOAQ01000002.1
3577; Streptomyces lavenduligriseus strain NRRL ISP-5487 contig2.1,
whole genome shotgun sequence; 664244706; NZ_JOBD01000002.1
3578; Streptomyces sp. NRRL S-920 contig36.1, whole genome
shotgun sequence; 664256887; NZ_JODF01000036.1
3579; Streptomyces sp. NRRL S-1448 contig134.1, whole
genome shotgun sequence; 663421576; NZ_JOGE01000134.1
3580; Streptomyces bicolor strain NRRL B-3897 contig42.1,
whole genome shotgun sequence; 671498318; NZ_JOFRO1000042.1
3581; Streptomyces sp. NRRL WC-3719 contig52.1, whole
genome shotgun sequence; 665530468; NZ_JOCD01000052.1
3582; Streptomyces sp. NRRL WC-3719 contig152.1, whole
genome shotgun sequence; 665536304; NZ_JOCD01000152.1
3583; Streptomyces sp. NRRL WC-3641 P206_Dorol_scaffold18,
whole genome shotgun sequence; 664607641; NZ_KL579016.1
3584; Streptomyces sp. NRRL B-1347 contig19.1, whole genome
shotgun sequence; 664141438; NZ_JOJM01000019.1
3585; Streptomyces toyocaensis strain NRRL 15009 contig00064,
whole genome shotgun sequence; 740092143; NZ_JFCB01000064.1
3586; Streptomyces natalensis strain NRRL B-5314 P055_
Dorol_scaffold13, whole genome shotgun sequence; 662108422;
NZ_KL570019.1
3587; Sphingobium yanoikuyae strain B1 contig000002, whole
genome shotgun sequence; 739661773; NZ_JGVR01000002.1
3588; Kibdelosporangium aridum subsp. largum strain NRRL
B-24462 contig91.5, whole genome shotgun sequence;
703243990; NZ_JNYM01001430.1
3589; Streptomyces ruber strain NRRL ISP-5378 contig2.1, whole
genome shotgun sequence; 665674644; NZ_JOAQ01000002.1
3590; Kutzneria albida DSM 43870, complete genome;
754862786; NZ_CP007155.1
3591; Streptomyces aurantiacus JA 4570 Seq28, whole genome
shotgun sequence; 514916412; NZ_AOPZ01000028.1
3592; Rothia dentocariosa strain C6B contig 5, whole genome
shotgun sequence; 739372122; NZJOHE01000003.1
3593; Xanthomonas cannabis pv. phaseoli strain Nyagatare scf
52938_7, whole genome shotgun sequence; 835885587;
NZ_KN265462.1
3594; Novosphingobium malaysiense strain MUSC 273 Contig9,
whole genome shotgun sequence; 746241774; NZ_JIDI01000009.1
3595; Novosphingobium subtenaneum strain DSM 12447 NJ75_
contig000028, whole genome shotgun sequence; 746290581;
NZJRVC01000028.1
3596; Jeotgalibacillus malaysiensis strain D5 chromosome,
complete genome; 749182744; NZ_CP009416.1
3597; Microcystis panniformis FACHB-1757, complete
genome; 917764592; NZ_CP011339.1
3598; Streptomyces sp. 769, complete genome; 749181963;
NZ_CP003987.1
3599; Actinoplanes sp. SE50/110, complete genome; 386845069;
NC_017803.1
3600; Salinarimonas rosea DSM 21201 G407DRAFT_
scaffold00021.21_C, whole genome shotgun sequence; 655990125;
NZ_AUBC01000024.1
3601; Methanobacterium arcticum strain M2 EI99DRAFT_
scaffold00005.5_C, whole genome shotgun sequence; 851140085;
NZ_JQKN01000008.1
3602; Allokutzneria albata strain NRRL B-24461 contig22.1,
whole genome shotgun sequence; 663596322; NZ_JOEF01000022.1
3603; Streptomyces olivaceus strain NRRL B-3009 contig20.1,
whole genome shotgun sequence; 664523889; NZ_JOFH01000020.1
3604; Streptomyces sp. NRRL S-118 P205_Doro1_scaffold2,
whole genome shotgun sequence; 664556736; NZ_KL591003.1
3605; Streptomyces sp. NRRL S-118 P205_Doro1_scaffold34,
whole genome shotgun sequence; 664565137; NZ_KL591029.1
3606; Streptomyces luteus strain TRM 45540 Scaffold1, whole
genome shotgun sequence; 759659849; NZ_KN039946.1
3607; Nonomumea candida strain NRRL B-24552 contig8 1, whole
genome shotgun sequence; 759934284; NZ_JOAG01000009.1
3608; Nonomumea candida strain NRRL B-24552 contig19.1, whole
genome shotgun sequence; 759941310; NZ_JOAG01000020.1
3609; Nonomumea candida strain NRRL B-24552 contig27.1, whole
genome shotgun sequence; 759944049; NZ_JOAG01000029.1
3610; Nonomumea candida strain NRRL B-24552 contig28.1, whole
genome shotgun sequence; 759944490; NZ_JOAG01000030.1
3611; Nonomumea candida strain NRRL B-24552 contig42.1, whole
genome shotgun sequence; 759948103; NZ_JOAG01000045.1
3612, Streptacidiphilus melanogenes strain NBRC 103184, whole
genome shotgun sequence; 755032408; NZ_BBPP01000024.1
3613, Streptacidiphilus anmyonensis strain NBRC 103185, whole
genome shotgun sequence; 755077919; NZ_BBPQ01000048.1
3614; Streptomyces nodosus strain ATCC 14899 genome;
759739811; NZ_CP009313.1
3615; Kibdelosporangium sp. MJ126-NF4, whole genome
shotgun sequence; 754819815; NZ_CDME01000002.1
3616; Streptomyces albus strain DSM 41398, complete
genome; 749658562; NZ_CP010519.1
3617; Novosphingobium sp. P6W scaffold17, whole genome
shotgun sequence; 763097360; NZ_JXZE01000017.1
3618; Magnetospirillum gryphiswaldense MSR-1 v2,
complete genome; 568144401; NC_023065.1
3619; Methanobacterium fonnicicum genome assembly DSM1535,
chromosome: chrI; 851114167; NZ_LN515531.1
3620; Streptomyces sp. NRRL B-1568 contig-76, whole
genome shotgun sequence; 799161588; NZ_JZWZ01000076.1
3621; Streptomyces rubellomurinus subsp. indigoferus strain
ATCC 31304 contig-55, whole genome shotgun sequence;
783374270; NZ_JZKG01000056.1
3622; Paenibacillus dauci strain H9 Scaffold3, whole genome
shotgun sequence; 808064534; NZ_KQ040798.1
3623; Allosalinactinospora lopnorensis strain CA15-2 contig00053,
whole genome shotgun sequence; 815864238; NZ_LAJC01000053.1
3624; Jiangella alkaliphila strain KCTC 19222 Scaffold1, whole
genome shotgun sequence; 820820518; NZ_KQ061219.1
3625; Streptomyces natalensis ATCC 27448 Scaffold 46, whole
genome shotgun sequence; 764442321; NZ_JRKI01000041.1
3626; Sphingomonas parapaucimobilis NBRC 15100 BBPI01000030,
whole genome shotgun sequence; 755134941; NZ_BBPI01000030.1
3627; Streptomyces avicenniae strain NRRL B-24776 contig3.1,
whole genome shotgun sequence; 919531973; NZ_JOEK01000003.1
3628; Streptomyces celluloflavus strain NRRL B-2493 contig27.1,
whole genome shotgun sequence; 919546534; NZ_JOEL01000027.1
3629; Streptomyces celluloflavus strain NRRL B-2493 contig60.1,
whole genome shotgun sequence; 919546651; NZ_JOEL01000060.1
3630; Streptomyces celluloflavus strain NRRL B-2493 contig66.1,
whole genome shotgun sequence; 919546672; NZ_JOEL01000066.1
3631; Sphingomonas sp. Y57 scaffold74, whole genome
shotgun sequence; 826051019; NZ_LDE501000074 .1
3632; Xanthomonas arboricola pv. juglandis strain Xaj 417
genome; 920673152; NZ_CP012251.1
3633; Xanthomonas campestris strain CFSAN033089 contig 46,
whole genome shotgun sequence; 920684790;
NZ_LHBW01000046.1
3634; Streptomyces sp. Mg1 supercont1.100, whole genome
shotgun sequence; 254387191; NZ_DS570483.1
3635; Streptomyces sp. HNS054 contig28, whole genome
shotgun sequence; 860547590; NZ_LDZX01000028.1
3636; Streptomyces ahygroscopicus subsp. wuyiensis strain
CK-15 contig3, whole genome shotgun sequence; 921220646;
NZ_JXYI02000059.1
3637; Paenibacillus peoriae strain HS311, complete genome;
922052336; NZ_CP011512.1
3638; Paenibacillus sp. FJAT-27812 scaffold_0, whole
genome shotgun sequence; 922780240; NZ_LIGH01000001.1
3639; Stenotrophomonas maltophilia strain ISMMS2R,
complete genome; 923060045; NZ_CP011306.1
3640; Stenotrophomonas maltophilia strain ISMMS3,
complete genome; 923067758; NZ_CP011010.1
3641; Hapalosiphon sp. MRB220 contig 91, whole genome
shotgun sequence; 923076229; NZ_LIRN01000111.1
3642; Bacillus sp. FJAT-18019 superl, whole genome
shotgun sequence; 924371245; NZ_LITP01000001.1
3643; Stenotrophomonas maltophilia strain B4 contig779, whole
genome shotgun sequence; 924516300; NZ_LDVR01000003.1
3644; Bacillus sp. FJAT-21352 Scaffold 1, whole genome
shotgun sequence; 924654439; NZ_LIUS01000003.1
3645; Sphingopyxis sp. 113P3, complete genome; 924898949;
NZ_CP009452.1
3646; Sphingopyxis sp. 113P3, complete genome; 924898949;
NZ_CP009452.1
3647; Streptomyces sp. CFMR 7 strain CFMR-7, complete
genome; 924911621; NZ_CP011522.1
3648; Bacillus gobiensis strain FJAT-4402 chromosome;
926268043; NZ_CP012600.1
3649; Streptomyces sp. M1V1G1522 P406contig11.1, whole
genome shotgun sequence; 926270045; NZ_LGDF01000013.1
3650; Nocardiopsis sp. NRRL B-16309 P441contig5.1, whole
genome shotgun sequence; 926283036; NZ_LGEC01000103.1
3651; Streptomyces sp. NRRL F-2295 P395contig79.1, whole
genome shotgun sequence; 926288193; NZ_LGCY01000146.1
3652; Streptomyces sp. XY431 P412contig111.1, whole
genome shotgun sequence; 926317398; NZ_LGDO01000015 .1
3653; Streptomyces sp. NRRL F-6492 P446contig3.1, whole
genome shotgun sequence; 926315769; NZ_LGEG01000211.1
3654; Streptomyces sp. NRRL B-1140 P439contig15.1, whole
genome shotgun sequence; 926344107; NZ_LGEA01000058.1
3655; Streptomyces sp. NRRL B-1140 P439contig32.1, whole
genome shotgun sequence; 926344331; NZ_LGEA01000105.1
3656; Streptomyces sp. NRRL F-5755 P309contig48.1, whole
genome shotgun sequence; 926371517; NZ_LGCW01000271.1
3657; Streptomyces sp. NRRL F-5755 P309contig50.1, whole
genome shotgun sequence; 926371520; NZ_LGCW01000274.1
3658; Streptomyces sp. NRRL F-5755 P309contig7.1, whole
genome shotgun sequence; 926371541; NZ_LGCW01000295.1
3659; Saccharothrix sp. NRRL B-16348 P442contig71.1, whole
genome shotgun sequence; 926395199; NZ_LGED01000246.1
3660; Streptomyces sp. WM6378 P402contig63.1, whole
genome shotgun sequence; 926403453; NZ_LGDD01000321.1
3661; Streptomyces sp. WM6378 P402contig63.1, whole
genome shotgun sequence; 926403453; NZ_LGDD01000321.1
3662; Nocardia sp. NRRL S-836 P437contig3.1b, whole
genome shotgun sequence; 926412094; NZ_LGDY01000103.1
3663; Nocardia sp. NRRL S-836 P437contig39.1, whole
genome shotgun sequence; 926412104; NZ_LGDY01000113.1
3664; Paenibacillus sp. A59 contig_353, whole genome
shotgun sequence; 927084730; NZ_LITU01000050.1
3665; Paenibacillus sp. A59 contig_416, whole genome
shotgun sequence; 927084736; NZ_LITU01000056.1
3666; Streptomyces sp. XY332 P409contig34.1, whole genome
shotgun sequence; 927093145; NZ_LGHN01000166.1
3667; Streptomyces rimosus subsp. rimosus strain NRRL
WC-3898 P259contig86.1, whole genome shotgun
sequence; 927279089; NZ_LGCU01000353.1
3668; Streptomyces rimosus subsp. pseudoverticillatus strain
NRRL WC-3896 P270contig51.1, whole genome shotgun
sequence; 927292651; NZ_LGCV01000382.1
3669; Streptomyces rimosus subsp. pseudoverticillatus strain
NRRL WC-3896 P270contig8.1, whole genome shotgun
sequence; 927292684; NZ_LGCV01000415.1
3670; Aneurinibacillus migulanus strain Nagano E1 contig_36,
whole genome shotgun sequence; 928874573; NZ_LIXL01000208.1
3671; Streptomyces chattanoogensis strain NRRL ISP-5002
ISP5002contig8.1, whole genome shotgun sequence; 928897585;
NZ_LGKG01000196.1
3672; Streptomyces chattanoogensis strain NRRL ISP-5002
ISP5002contig9.1, whole genome shotgun sequence; 928897596;
NZ_LGKG01000207.1
3673; Streptomyces sp. NRRL F-6602 F6602contig54.1, whole
genome shotgun sequence; 928910033; NZ_LGKH01004848.1
3674; Ideonella sakaiensis strain 201-F6, whole genome
shotgun sequence; 928998724; NZ_BBYR01000007.1
3675; Ideonella sakaiensis strain 201-F6, whole genome
shotgun sequence; 928998800; NZ_BBYR01000083.1
3676; Bacillus sp. FJAT-28004 scaffold_2, whole genome
shotgun sequence; 929005248; NZ_LGHP01000003.1
3677; Novosphingobium sp. AAP1 AAP1Contigs7, whole
genome shotgun sequence; 930029075; NZ_UHO01000007.1
3678; Novosphingobium sp. AAP1 AAP1Contigs9, whole
genome shotgun sequence; 930029077; NZ_LJHO01000009.1
3679; Stenotrophomonas maltophilia strain OC194 contig_98,
whole genome shotgun sequence; 930169273; NZ_LEH01000098.1
3680; Actinobacteria bacterium OK074 ctg60, whole genome
shotgun sequence; 930473294; NZ_LJCV01000275.1
3681; Actinobacteria bacterium OK006 ctg112, whole genome
shotgun sequence; 930490730; NZ_LJCU01000014.1
3682; Actinobacteria bacterium OK006 ctg96, whole genome
shotgun sequence; 930491003; NZ_LJCU01000287.1
3683; Kibdelosporangium phytohabitans strain KLBMP1111,
complete genome; 931609467; NZ_CP012752.1
3684; Streptococcus pneumoniae strain P18082 isolate E3GXY,
whole genome shotgun sequence; 935445269; NZ_CIEC02000098.1
3685; Paenibacillus solani strain FJAT-22460 super3, whole
genome shotgun sequence; 935460965; NZ_LIUT01000006.1
3686; Novosphingobium sp. ST904 contig_104, whole genome
shotgun sequence 935540718; NZ_LGJH01000063.1
3687; Citromicrobium sp. RCC1878 contig2, whole genome
shotgun sequence; 936191447; NZ_LBLZ01000002.1
3688; Frankia sp. R43 contig001, whole genome shotgun
sequence; 937182893; NZ_LFCW01000001.1
3689; Sphingopyxis macrogoltabida strain EY-1, complete
genome; 937372567; NZ_CP012700.1
3690; Sphingopyxis macrogoltabida strain EY-1, complete
genome; 937372567; NZ_CP012700.1
3691; Xanthomonas arboricola strain CITA 44 CITA_44_contig 26,
whole genome shotgun sequence; 937505789; NZ_LJGM01000026.1
3692; Stenotrophomonas acidaminiphila strain ZAC14D2_
NAIMI4_2, complete genome; 938883590; NZ_CP012900.1
3693; Sphingopyxis macrogoltabida strain 203, complete
genome; 938956730; NZ_CP009429.1
3694; Sphingopyxis macrogoltabida strain 203, complete
genome; 938956730; NZ_CP009429.1
3695; Sphingopyxis macrogoltabida strain 203 plasmid,
complete sequence; 938956814; NZ_CP009430.1
3696; Cellulosilyticum ruminicola JCM 14822, whole genome
shotgun sequence; 938965628; NZ_BBCG01000065.1
3697; Brevundimonas sp. DS20, complete genome; 938989745;
NZ_CP012897.1
3698; Brevundimonas sp. D520, complete genome; 938989745;
NZ_CP012897.1
3699; Paenibacillus sp. GD6, whole genome shotgun sequence;
939708098; NZ_LN831198.1
3700; Paenibacillus sp. GD6, whole genome shotgun sequence;
939708105; NZ_LN831205.1
3701; Alicyclobacillus ferrooxydans strain TC-34 contig 22, whole
genome shotgun sequence; 940346731; NZ_LJC001000107.1
3702; Xanthomonas sp. Mitacek01 contig_17, whole genome
shotgun sequence; 941965142; NZ_LKIT01000002.1
3703; Streptomyces bingchenggensis BCW-1, complete
genome; 374982757; NC_016582.1
3704; Streptomyces pactum strain ACT12 scaffold1, whole
genome shotgun sequence; 943388237; NZ_LIQD01000001.1
3705; Streptomyces flocculus strain NRRL B-2465 B2465_
contig_205, whole genome shotgun sequence; 943674269;
NZ_LIQ001000205.1
3706; Streptomyces aurantiacus strain NRRL ISP-5412 ISP-5412_
contig_138, whole genome shotgun sequence; 943881150;
NZ_LIPP01000138.1
3707; Streptomyces graminilatus strain NRRL B-59124 B59124_
contig_7, whole genome shotgun sequence; 943897669;
NZ_LIQQ01000007.1
3708; Streptomyces alboniger strain NRRL B-1832 B-1832_
contig_37, whole genome shotgun sequence; 943898694;
NZ_LIQN01000037.1
3709; Streptomyces alboniger strain NRRL B-1832 B-1832_
contig_384, whole genome shotgun sequence; 943899498;
NZ_LIQN01000384.1
3710; Streptomyces kanamyceticus strain NRRL B-2535 B-2535_
contig_122, whole genome shotgun sequence; 943922224;
NZ_LIQU01000122.1
3711; Streptomyces kanamyceticus strain NRRL B-2535 B-2535_
contig_247, whole genome shotgun sequence; 943922567;
NZ_LIQU01000247.1
3712; Streptomyces luridiscabiei strain NRRL B-24455 B24455_
contig_315, whole genome shotgun sequence; 943927948;
NZ_LIQV01000315.1
3713; Streptomyces attiruber strain NRRL B-24165 contig_
124, whole genome shotgun sequence; 943949281;
NZ_LIPN01000124.1
3714; Streptomyces hirsutus strain NRRL B-2713 B2713_
contig_57, whole genome shotgun sequence; 944005810;
NZ_LIQT01000057.1
3715; Streptomyces aureus strain NRRL B-2808 contig 171, whole
genome shotgun sequence; 944012845; NZ_LIPQ01000171.1
3716; Streptomyces prasinus strain NRRL B-12521 B12521_
contig_230, whole genome shotgun sequence; 944020089;
NZ_LIPR01000230.1
3717; Streptomyces phaeochromogenes strain NRRL B-1248 B-
1248_contig_126, whole genome shotgun sequence; 944029528;
NZ_LIQZ01000126.1
3718; Streptomyces prasinus strain NRRL B-2712 B2712_
contig_323, whole genome shotgun sequence; 944410649;
NZ_LIRH01000323.1
3719; Streptomyces prasinopilosus strain NRRL B-2711
B2711_contig_370, whole genome shotgun sequence; 944415035;
NZ_LIRG01000370.1
3720; Streptomyces torulosus strain NRRL B-3889 B-3889_
contig_18, whole genome shotgun sequence; 944495433;
NZ_LIRK01000018.1
3721; Frankia alni str. ACN14A chromosome, complete
sequence; 111219505; NC_008278.1
3722; Frankia sp. CpI1-S FF36_scaffold_9.10, whole genome
shotgun sequence; 768715243; NZ_JYFN01000010.1
3723; Sphingomonas sp. Leaf20 contig_1, whole genome
shotgun sequence; 947349881; NZ_LMKN01000001.1
3724; Paenibacillus sp. Leaf72 contig_6, whole genome
shotgun sequence; 947378267; NZ_LMLV01000032.1
3725; Sphingomonas sp. Leaf230 contig 4, whole genome
shotgun sequence; 947401208; NZ_LMKW01000010.1
3726; Sanguibacter sp. Leaf3 contig_2, whole genome
shotgun sequence; 947472882; NZ_LMRH01000002.1
3727; Aeromicrobium sp. Root344 contig_1, whole genome
shotgun sequence; 947552260; NZ_LMDH01000001.1
3728; Sphingopyxis sp. Root1497 contig_3, whole genome
shotgun sequence; 947689975; NZ_LMGF01000003.1
3729; Sphingomonas sp. Root1294 contig_7, whole genome
shotgun sequence; 947890193; NZ_LMEJ01000014.1
3730; Sphingomonas sp. Root720 contig_7, whole genome
shotgun sequence; 947704642; NZ_LMID01000015.1
3731; Sphingomonas sp. Root720 contig_8, whole genome
shotgun sequence; 947704650; NZ_LMID01000016.1
3732; Sphingomonas sp. Root710 contig_1, whole genome
shotgun sequence; 947721816; NZ_LMLB01000001.1
3733; Sphingomonas sp. Root1294 contig_7, whole genome
shotgun sequence; 947890193; NZ_LMEJ01000014.1
3734; Mesorhizobium sp. Root172 contig_2, whole genome
shotgun sequence; 947919015; NZ_LMHP01000012.1
3735; Mesorhizobium sp. Root102 contig_3, whole genome
shotgun sequence; 947937119; NZ_LMCP01000023.1
3736; Paenibacillus sp. 5oi1750 contig_1, whole genome
shotgun sequence; 947966412; NZ_LMSD01000001.1
3737; Paenibacillus sp. 5oi1522 contig_3, whole genome
shotgun sequence; 947983982; NZ_LMRV01000044.1
3738; Paenibacillus sp. 5oi1522 contig_3, whole genome
shotgun sequence; 947983982; NZ_LMRV01000044.1
3739; Paenibacillus sp. Root52 contig_3, whole genome
shotgun sequence; 948045460; NZ_LMFO01000023.1
3740; Enterococcus faecalis ATCC 29212 contig24, whole
genome shotgun sequence; 401673929; ALOD01000024.1
3741; Mesorhizobium sp. Root695 contig_1, whole genome
shotgun sequence; 950019035; NZ_LMH001000001.1
3742; Bacillus sp. Soil768D1 contig_5, whole genome
shotgun sequence; 950170460; NZ_LMTA01000046.1
3743; Paenibacillus sp. Root444D2 contig_4, whole genome
shotgun sequence; 950271971; NZ_LME001000034.1
3744; Paenibacillus sp. Soil766 contig_32, whole genome
shotgun sequence; 950280827; NZ_LMSJ01000026.1
3745; Streptococcus pneumoniae strain type strain: N, whole
genome shotgun sequence; 950938054; NZ_CIHL01000007.1
3746; Streptomyces sp. Root1310 contig_5, whole genome
shotgun sequence; 951121600; NZ_LMEQ01000031.1
3747; Bacillus mumlis strain DSM 16288 Scaffold4, whole
genome shotgun sequence; 951610263; NZ_LMBV01000004.1
3748; Streptomyces sp. MBT76 scaffold_2, whole genome
shotgun sequence; 953813788; NZ_LNBE01000002.1
3749; Streptomyces sp. MBT76 scaffold_3, whole genome
shotgun sequence; 953813789; NZ_LNBE01000003.1
3750; Streptomyces sp. MBT76 scaffold_4, whole genome
shotgun sequence; 953813790; NZ_LNBE01000004.1
3751; Clostridium butyricum strain KN1J-L09 chromosome
1, complete sequence; 959868240; NZ_CP013252.1
3752; Clostridium butyricum strain NEC8, whole genome
shotgun sequence; 960334134; NZ_CBYK010000003.1
3753; Gorillibacterium sp. SN4, whole genome shotgun
sequence; 960412751; NZ_LN881722.1
3754; Thalassobius activus strain CECT 5114, whole genome
shotgun sequence; 960424655; NZ_CYUE01000025.1
3755; Microbacterium testaceum strain N5283 contig_37, whole
genome shotgun sequence; 969836538; NZ_LDRU01000037.1
3756; Microbacterium testaceum strain N5206 contig_27, whole
genome shotgun sequence; 969912012; NZ_LDRS01000027.1
3757; Microbacterium testaceum strain N5183 contig_65, whole
genome shotgun sequence; 969919061; NZ_LDRR01000065.1
3758; Paenibacillus jamilae strain NS115 contig_7, whole
genome shotgun sequence; 970428876; NZ_LDRX01000027.1
3759; Sphingopyxis sp. H050 H050_contig000006, whole
genome shotgun sequence; 970555001; NZ_LNRZ01000006.1
3760; Paenibacillus polymyxa strain KF-1 scaffold00001, whole
genome shotgun sequence; 970574347; NZ_LNZF01000001.1
3761; Luteimonas abyssi strain XH031 Scaffold1, whole
genome shotgun sequence; 970579907; NZ_KQ759763.1

TABLE 5
Exemplary Lasso RRE
Lasso RRE Peptide No: #; Species of Origin; GI #; Accession #

3762; Geobacter uraniireducens Rf4, complete genome; 148262085;
NC_009483.1
3763; Sphingomonas wittichii RW1, complete genome; 148552929;
NC_009511.1
3764; Sanguibacter keddieii DSM 10542, complete genome; 269793358;
NC_013521.1
3765; Xylanimonas cellulosilytica DSM 15894, complete genome; 269954810;
NC_013530.1
3766; Spirosoma linguale DSM 74, complete genome; 283814236; CP001769.1
3767; Streptomyces bingchenggensis BCW-1, complete genome; 374982757;
NC_016582.1
3768; Streptomyces bingchenggensis BCW-1, complete genome; 374982757;
NC_016582.1
3769; Gallionella capsifeniformans ES-2, complete genome; 302877245;
NC_014394.1
3770; Mycobacterium sinense strain JDM601, complete genome; 333988640;
NC_015576.1
3771; Streptomyces violaceusniger Tu 4113, complete genome; 345007964;
NC_015957.1
3772; Rhodospirillum rubrum F11, complete genome; 386348020; NC_017584.1
3773; Actinoplanes sp. SE50/110, complete genome; 386845069; NC_017803.1
3774; Emticicia oligotrophica DSM 17448, complete genome; 408671769;
NC_018748.1
3775; Tistrellamobilis KA081020-065 plasmid pTM1, complete sequence;
442559580; NC_017957.2
3776; Bacillus thuringiensis MC28, complete genome; 407703236; NC_018693.1
3777; Nostoc sp. PCC 7107, complete genome; 427705465; NC_019676.1
3778; Synechococcus sp. PCC 6312, complete genome; 427711179;
NC_019680.1
3779; Stanieria cyanosphaera PCC 7437, complete genome; 428267688;
CP003653.1
3780; Desulfocapsa sulfexigens DSM 10523, complete genome; 451945650;
NC_020304.1
3781; Xanthomonas citri pv. punicae str. LMG 859, whole genome shotgun
sequence; 390991205; NZ_CAGJ01000031.1
3782; Streptomyces fulvissimus DSM 40593, complete genome; 488607535;
NC_021177.1
3783; Streptomyces rapamycinicus NRRL 5491 genome; 521353217;
CP006567.1
3784; Gloeobacter kilaueensis JS1, complete genome; 554634310; NC_022600.1
3785; Gloeobacter kilaueensis JS1, complete genome; 554634310; NC_022600.1
3786; Kutzneria albida strain NRRL B-24060 contig305.1, whole genome shotgun
sequence; 662161093; NZ_JNYH01000515.1
3787; Kutzneria albida strain NRRL B-24060 contig305.1, whole genome shotgun
sequence; 662161093; NZ_JNYH01000515.1
3788; Mesorhizobium huakuii 7653R genome; 657121522; CP006581.1
3789; Sphingopyxis fiibergensis strain Kp5.2, complete genome; 749188513;
NZ_CP009122.1
3790; Amycolatopsis lurida NRRL 2430, complete genome; 755908329;
CP007219.1
3791; Streptomyces lydicus A02, complete genome; 822214995;
NZ_CP007699.1
3792; Streptomyces lydicus A02, complete genome; 822214995;
NZ_CP007699.1
3793; Uncultured bacterium clone AZ25P121 genomic sequence; 818476494;
KP274854.1
3794; Streptomyces sp. PBH53 genome; 852460626; CP011799.1
3795; Streptomyces sp. PBH53 genome; 852460626; CP011799.1
3796; Streptomyces sp. PBH53 genome; 852460626; CP011799.1
3797; Bifidobacterium longum subsp infantis strain BT1, complete genome;
927296881; CP010411.1
3798; Nostoc piscinale CENA21 genome; 930349143; CP012036.1
3799; Paenibacillus sp. 320-W, complete genome; 961447255; CP013653.1
3800; Streptomyces avermitilis MA-4680 = NBRC 14893, complete genome;
162960844; NC_003155.4
3801; Streptomyces avermitilis MA-4680 = NBRC 14893, complete genome;
162960844; NC_003155.4
3802; Kitasatospora setae KM-6054 DNA, complete genome; 357386972;
NC_016109.1
3803; Rhodococcus jostii lariatin biosynthetic gene cluster (larA, larB, larC, larD, larE),
complete cds; 380356103; AB593691.1
3804; Pseudomonas sp. St29 DNA, complete genome; 771846103; AP014628.1
3805; Pseudomonas sp. St29 DNA, complete genome; 771846103; AP014628.1
3806; Fischerella sp. NIES-3754 DNA, complete genome; 965684975;
AP017305.1
3807; Magnetospirillum gryphiswaldense MSR-1, WORKING DRAFT
SEQUENCE, 373 unordered pieces; 144897097; CU459003.1
3808; Streptococcus suis 98HAH33, complete genome; 145690656; CP000408.1
3809; Salinibacter ruber M8 chromosome, complete genome; 294505815;
NC_014032.1
3810; Enterococcus faecalis strain P9-1 scaffold484.1, whole genome shotgun
sequence; 949763393; NZ_LKGS01000484.1
3811; Saccharothrix espanaensis DSM 44229 complete genome; 433601838;
NC_019673.1
3812; Roseburia sp. CAG:197 WGS project CBBL01000000 data, contig, whole
genome shotgun sequence; 524261006; CBBL010000225.1
3813; Clostridium sp. CAG:221 WGS project CBDC01000000 data, contig,
whole genome shotgun sequence; 524362382; CBDC010000065.1
3814; Clostridium sp. CAG:411 WGS project CBIY01000000
genome shotgun sequence; 524742306; CBIY010000075.1
3815; Roseburia sp. CAG:100 WGS project CBKV01000000 data, contig, whole
genome shotgun sequence; 524842500; CBKV010000277.1
3816; Mesorhizobium plurifarium, whole genome shotgun sequence; 751292755;
NZ_CCNE01000004.1
3817; Kibdelosporangium sp. MJ126-NF4, whole genome shotgun sequence;
754819815; NZ_CDME01000002.1
3818; Kibdelosporangium sp. MJ126-NF4 genome assembly High
quaKibdelosporangium sp. MJ126-NF4, scaffold BPA_8, whole genome shotgun
sequence; 747653426; CDME01000011.1
3819; Methanobacterium formicicum genome assembly isolate Mb9,
chromosome : I; 952971377; LN734822.1
3820; Streptococcus pneumoniae strain type strain: N, whole genome shotgun
sequence; 950938054; NZ_CIHL01000007.1
3821; Streptococcus pneumoniae strain type strain: N, whole genome shotgun
sequence; 950938054; NZ_CIHL01000007.1
3822; Streptococcus pneumoniae strain type strain: N, whole genome shotgun
sequence; 950938054; NZ_CIHL01000007.1
3823; Bacillus cereus genome assembly Bacillus JRS4, contig contig000025,
whole genome shotgun sequence; 924092470; CYHM01000025.1
3824; Pedobacter sp. BAL39 1103467000492, whole genome shotgun sequence;
149277373; NZ_ABCM01000005.1
3825; Streptomyces sviceus ATCC 29083 chromosome, whole genome shotgun
sequence; 297196766; NZ_CM000951.1
3826; Streptomyces pristinaespiralis ATCC 25486 chromosome, whole genome
shotgun sequence; 297189896; NZ_CM000950.1
3827; Enterococcus faecalis strain P9-1 scaffold484.1, whole genome shotgun
sequence; 949763393; NZ_LKGS01000484.1
3828; Enterococcus faecalis strain P9-1 scaffold484.1, whole genome shotgun
sequence; 949763393; NZ_LKGS01000484.1
3829; Streptomyces sp. CN5654 CD02DRAFT_scaffold00023.23_C, whole
genome shotgun sequence; 695856316; NZ_INLT01000024.1
3830; Streptococcus vestibularis F0396 ctg1126932565723, whole genome
shotgun sequence; 311100538; AEK001000007.1
3831; Ruminococcus albus 8 contig00035, whole genome shotgun sequence;
data, contig, whole 325680876; NZ_ADKM02000123.1
3832; Streptomyces sp. W007 contig00293, whole genome shotgun sequence;
365867746; NZ_AGSW01000272.1
3833; Streptomyces auratus AGR0001 Scaffold1_85, whole genome shotgun
sequence; 396995461; AJGV01000085.1
3834; Actinomyces naeslundii str. Howell 279 ctg1130888818142, whole genome
shotgun sequence; 399903251; ALJK01000024.1
3835; Enterococcus faecalis strain P9-1 scaffold484.1, whole genome shotgun
sequence; 949763393; NZ_LKGS01000484.1
3836; Amycolatopsis decaplanina DSM 44594 Contig0055, whole genome
shotgun sequence; 458848256; NZ_AOHO01000055.1
3837; Streptomyces mobaraensis NBRC 13819 = DSM 40847 contig024, whole
genome shotgun sequence; 458977979; NZ_AORZ01000024.1
3838; Enterococcus faecalis strain P9-1 scaffold484.1, whole genome shotgun
sequence; 949763393; NZ_LKGS01000484.1
3839; Enterococcus faecalis strain P9-1 scaffold484.1, whole genome shotgun
sequence; 949763393; NZ_LKGS01000484.1
3840; Streptomyces aurantiacus JA 4570 Seq28, whole genome shotgun sequence;
514916412; NZ_AOPZ01000028.1
3841; Streptomyces aurantiacus JA 4570 Seq17, whole genome shotgun sequence;
514916021; NZ_AOPZ01000017.1
3842; Enterococcus faecalis strain P9-1 scaffold484.1, whole genome shotgun
sequence; 949763393; NZ_LKGS01000484.1
3843; Paenibacillus alvei A6-6i-x PAAL66ix_14, whole genome shotgun
sequence; 528200987; ATMS01000061.1
3844; Dehalobacter sp. UNSWDHB Contig_139, whole genome shotgun
sequence; 544905305; NZ_AUUR01000139.1
3845; Actinobaculum sp. oral taxon 183 str. F0552 A_P1HMPREF0043-
1.0 Cont15.2, whole genome shotgun sequence; 541473965; AWSB01000041.1
3846; Actinobaculum sp. oral taxon 183 str. F0552 A_P1HMPREF0043-
1.0_Cont1.1, whole genome shotgun sequence; 541476958; AWSB01000006.1
3847; Propionibacterium acidifaciens F0233 ctg1127964738299, whole genome
shotgun sequence; 544249812; ACVN02000045.1
3848; Rubidibacter lacunae KORDI 51-2 KR5 l_contig00121, whole genome
shotgun sequence; 550281965; NZ_ASSJ01000070.1
3849; Rothia aeria F0184 R aerigIMPREF0742-1.0_Cont136.4, whole genome
shotgun sequence; 551695014; AXZGO1000035.1
3850; Candidatus Halobonum tyrrellensis G22 contig00002, whole genome
shotgun sequence; 557371823; NZ_ASGZ01000002.1
3851; Streptomyces niveus NCIMB 11891 contig00003, whole genome shotgun
sequence; 558542923; AWQW01000003.1
3852; Frankia sp. Thr ThrDRAFT_scaffold_28.29, whole genome shotgun
sequence; 602262270; JENI01000029.1
3853; Clostridium butyricum DORA_1 Q607_CBUC00058, whole genome
shotgun sequence; 566226100; AZLX01000058.1
3854; Streptococcus sp. DORA_10 Q617_5P5C00257, whole genome shotgun
sequence; 566231608; AZMH01000257.1
3855; Candidatus Entotheonella factor TSYl_contig00913, whole genome
shotgun sequence; 575408569; AZHW01000959.1
3856; Streptomyces sp. CN5654 CD02DRAFT_scaffold00023.23S, whole
genome shotgun sequence; 695856316; NZ_JNLT01000024.1
3857; Frankia sp. Thr ThrDRAFT_scaffold_28.29, whole genome shotgun
sequence; 602262270; JENI01000029.1
3858; Bacillus akibai JCM 9157, whole genome shotgun sequence; 737696658;
NZ_BAUV01000025.1
3859; Bacillus boroniphilus JCM 21738 DNA, contig: contig 6, whole genome
shotgun sequence; 571146044; BAUW01000006.1
3860; Gracilibacillus boraciitolerans JCM 21714 DNA, contig:contig_30, whole
genome shotgun sequence; 575082509; BAVS01000030.1
3861; Streptomyces griseorubens strain JSD-1 contig143, whole genome shotgun
sequence; 657284919; BMG01000143.1
3862; Frankia sp. CeD CEDDRAFT_scaffold_22.23, whole genome shotgun
sequence; 737947180; NZ_JPGU01000023.1
3863; Frankia sp. Thr ThrDRAFT_scaffold 28.29, whole genome shotgun
sequence; 602262270; JENI01000029.1
3864; Streptomyces sp. JS01 contig2, whole genome shotgun sequence;
695871554; NZ_JPWW01000002.1
3865; Rothia dentocariosa strain C6B contig 5, whole genome shotgun sequence;
739372122; NZ_JQHE01000003.1
3866; Candidatus Thiomargarita nelsonii isolate Hydrate Ridge contig_1164,
whole genome shotgun sequence; 723288710; JSZA01001164.1
3867; Streptomyces globisporus C-1027 Scaffold24_1, whole genome shotgun
sequence; 410651191; NZ_AJU001000171.1
3868; Lechevalieria aerocolonigenes strain NRRL B-16140 contig11.3, whole
genome shotgun sequence; 772744565; NZ_JYJG01000059.1
3869; Desulfobulbaceae bacterium BRH_c16a BRHa_1001515, whole genome
shotgun sequence; 780791108; LADS01000058.1
3870; Peptococcaceae bacterium BRH_c4b BRHa_1001357, whole genome
shotgun sequence; 780813318; LAD001000010.1
3871; Streptomyces rubellomurinus subsp. indigoferus strain ATCC 31304 contig-55,
whole genome shotgun sequence; 783374270; NZ_JZKG01000056.1
3872; Streptomyces sp. NRRL S-444 contig322.4, whole genome shotgun
sequence; 797049078; JZWX01001028.1
3873; Streptomyces sp. NRRL B-1568 contig-76, whole genome shotgun
sequence; 799161588; NZ_JZWZ01000076.1
3874; Streptomyces caatingaensis strain CMAA 1322 contig02, whole genome
shotgun sequence; 906344334; NZ_LFXA01000002.1
3875; Paenibacillus polymyxa strain YUPP-8 scaffold32, whole genome shotgun
sequence; 924434005; LIYK01000027.1
3876; Streptomyces rimosus subsp. rimosus strain NRRL B-16073 contig48.1,
whole genome shotgun sequence; 696497741; NZ_JNWX01000048.1
3877; Streptomyces rimosus subsp. rimosus ATCC 10970 contig00333, whole
genome shotgun sequence; 441178796; NZ_ANSJ01000259.1
3878; Streptomyces rimosus subsp. rimosus strain NRRL B-16073 contig48.1,
whole genome shotgun sequence; 696497741; NZ_JNWX01000048.1
3879; Streptomyces rimosus subsp. rimosus strain NRRL WC-3869
P248contig20.1, whole genome shotgun sequence; 925322461;
LGCQ01000113.1
3880; Streptomyces rimosus subsp. rimosus ATCC 10970 contig00333, whole
genome shotgun sequence; 441178796; NZ_ANSJ01000259.1
3881; Streptomyces rimosus subsp. rimosus ATCC 10970 contig00333, whole
genome shotgun sequence; 441178796; NZ_ANSJ01000259.1
3882; Streptomyces rimosus subsp. rimosus strain NRRL B-16073 contig48.1,
whole genome shotgun sequence; 696497741; NZ_JNWX01000048.1
3883; Streptomyces rimosus subsp. rimosus strain NRRL B-2660 contig124.1,
whole genome shotgun sequence; 664066234; NZ_JOES01000124.1
3884; Streptomyces sp. NRRL F-5755 P309contig50.1, whole genome shotgun
sequence; 926371520; NZ_LGCW01000274.1
3885; Streptomyces sp. NRRL F-5755 P309contig48.1, whole genome shotgun
sequence; 926371517; NZ_LGCW01000271.1
3886; Streptomyces sp. NRRL S-444 contig322.4, whole genome shotgun
sequence; 797049078; JZWX01001028.1
3887; Actinobacteria bacterium 01006 ctg96, whole genome shotgun sequence;
930491003; NZ_LJCU01000287.1
3888; Actinobacteria bacterium OK074 ctg60, whole genome shotgun sequence;
930473294; NZ_LJCV01000275.1
3889; Betaproteobacteria bacterium 5G8 39 WOR 8-12 2589, whole genome
shotgun sequence; 931421682; LJTQ01000030.1
3890; Candidate division BRC1 bacterium SM23_51 WORSMTZ_10094, whole
genome shotgun sequence; 931536013; LJUL01000022.1
3891; Bacillus vietnamensis strain UCD-SED5 scaffold_15, whole genome
shotgun sequence; 933903534; LIXZ01000017.1
3892; Erythrobacteraceae bacterium HL-111 ITZY_scaf_51, whole genome
shotgun sequence; 938259025; LJSW01000006.1
3893; Halomonas sp. HL-93 ITZY_scaf 415, whole genome shotgun sequence;
938285459; LJST01000237.1
3894; Paenibacillus sp. Soi1724D2 contig_11, whole genome shotgun sequence;
946400391; LMRY01000003.1
3895; Paenibacillus sp. Root444D2 contig_4, whole genome shotgun sequence;
950271971; NZ_LME001000034.1
3896; Streptomyces silvensis strain ATCC 53525 53525 Assembly_Contig_22,
whole genome shotgun sequence; 970361514; LOCL01000028.1
3897; Bacillus mycoides strain Flugge 10206 DJ94.contig-100_16, whole genome
shotgun sequence; 727343482; NZ_JMQD01000030.1
3898; Bacillus cereus BAG3X2-1 supercont1.1, whole genome shotgun sequence;
423416528; NZ_JH791923.1
3899; Bacillus thuringiensis MC28, complete genome; 407703236; NC_018693.1
3900; Bacillus cereus VD131 acrHi-supercont1.9, whole genome shotgun
sequence; 507037581; NZ_KB976660.1
3901; Bacillus cereus Rock4-18 chromosome, whole genome shotgun sequence;
238801487; NZ_CM000735.1
3902; Bacillus cereus AH1271 chromosome, whole genome shotgun sequence;
238801491; NZ_CM000739.1
3903; Bacillus cereus Rock3-44 chromosome, whole genome shotgun sequence;
238801485; NZ_CM000733.1
3904; Bacillus cereus VD115 supercont1.1, whole genome shotgun sequence;
423614674; NZ_JH792165.1
3905; Bacillus sp. UMTAT18 contig000011, whole genome shotgun sequence;
806951735; NZ_JSFD01000011.1
3906; Bacillus cereus BAG5X2-1 supercont1.1, whole genome shotgun sequence;
423456860; NZ_JH791975.1
3907; Streptococcus pneumoniae strain type strain: N, whole genome shotgun
sequence; 950938054; NZ_CIHL01000007.1
3908; Bacillus cereus VD142 actaa-supercont2.2, whole genome shotgun
sequence; 514340871; NZ_KE150045.1
3909; Bacillus cereus BAG60-2 supercont1.1, whole genome shotgun sequence;
423468694; NZ_JH804628.1
3910; Bacillus mycoides FSL H7-687 Contig052, whole genome shotgun
sequence; 727271768; NZ_ASPY01000052.1
3911; Bacillus cereus HuA2-9 acqVt-supercont1.1, whole genome shotgun
sequence; 507020427; NZ_KB976152.1
3912; Bacillus cereus HuA4-10 supercont1.1, whole genome shotgun sequence;
423520617; NZ_JH792148.1
3913; Bacillus cereus MC67 supercont1.2, whole genome shotgun sequence;
423557538; NZ_JH792114.1
3914; Bacillus cereus AH621 chromosome, whole genome shotgun sequence;
238801471; NZ_CM000719.1
3915; Bacillus cereus VD107 supercont1.1, whole genome shotgun sequence;
423609285; NZ_JH792232.1
3916; Bacillus cereus VDM034 supercont1.1, whole genome shotgun sequence;
423666303; NZ_JH791809.1
3917; Bacillus cereus BAG5X1-1 supercont1.1, whole genome shotgun sequence;
423451256 ;NZ_JH791996.1
3918; Enterococcus faecalis strain P9-1 scaffold484.1, whole genome shotgun
sequence; 949763393; NZ_LKGS01000484.1
3919; Clostridium butyricum 5521 gcontig_1106103650482, whole genome
shotgun sequence; 182420360; NZ_ABDT01000120.2
3920; Rhodobacter sphaeroides WS8N chromosome chrI, whole genome shotgun
sequence; 332561612; NZ_CM001161.1
3921; Methylosinus ttichosporium OB3b MettrDRAFT_Contig106_C, whole
genome shotgun sequence; 639846426; NZ_ADVE02000001.1
3922; Streptomyces clavuligerus ATCC 27064 supercont1.55, whole genome
shotgun sequence; 254392242; NZ_DS570678.1
3923; Streptomyces rimosus subsp. rimosus strain NRRL B-16073 contig48.1,
whole genome shotgun sequence; 696497741; NZ_JNWX01000048.1
3924; Streptomyces rimosus subsp. rimosus ATCC 10970 contig00333, whole
genome shotgun sequence; 441178796; NZ_ANSJ01000259.1
3925; Streptomyces viridochromogenes DSM 40736 supercont1.1, whole genome
shotgun sequence; 224581107; NZ_GG657757.1
3926; Streptomyces viridochromogenes DSM 40736 supercont1.1, whole genome
shotgun sequence; 224581107; NZ_GG657757.1
3927; Methanobacterium formicicum DSM 3637 Contig04, whole genome
shotgun sequence; 408381849; NZ_AMP001000004.1
3928; Methanobacterium formicicum DSM 3637 Contig04, whole genome
shotgun sequence; 408381849; NZ_AMP001000004.1
3929; Sphingobium yanoikuyae strain SHJ scaffold2, whole genome shotgun
sequence; 893711333; NZ_KQ235984.1
3930; Streptomyces mobaraensis NBRC 13819 = DSM 40847 contig024, whole
genome shotgun sequence; 458977979; NZ_AORZ01000024.1
3931; Streptomyces mobaraensis NBRC 13819 = DSM 40847 contig079, whole
genome shotgun sequence; 458984960; NZ_AORZ01000079.1
3932; Amycolatopsis azurea DSM 43854 contig60, whole genome shotgun
sequence; 451338568; NZ_ANMG01000060.1
3933; Streptomyces pristinaespiralis ATCC 25486 chromosome, whole genome
shotgun sequence; 297189896; NZ_CM000950.1
3934; Xanthomonas citri pv. punicae str. LMG 859, whole genome shotgun
sequence; 390991205; NZ_CAGJO1000031.1
3935; Streptomyces sp. CNS654 CD02DRAFT_scaffold00023.23_C, whole
genome shotgun sequence; 695856316; NZ_JNLT01000024.1
3936; Mesorhizobium amolphae CCNWGS0123 contig00204, whole genome
shotgun sequence; 357028583; NZ_AGSNO1000187.1
3937; Leptolyngbya sp. PCC 7375 Lepto7375DRAFT_LPA.5, whole genome
shotgun sequence; 427415532; NZ_JH993797.1
3938; Streptomyces auratus AGR0001 Scaffold1, whole genome shotgun
sequence; 398790069; NZ_JH725387.1
3939; Streptomyces auratus AGR0001 Scaffold1_85, whole genome shotgun
sequence; 396995461; AJGV01000085.1
3940; Paenibacillus dendritiformis C454 PDENDC1000064, whole genome
shotgun sequence; 374605177; NZ_AHKH01000064.1
3941; Halosimplex carlsbadense 2-9-1 contig 4, whole genome shotgun sequence;
448406329; NZ_AOIU01000004.1
3942; Amycolatopsis decaplanina DSM 44594 Contig0055, whole genome
shotgun sequence; 458848256; NZ_AOH001000055.1
3943; Fictibacillus macauensis ZFHKF-1 Contig20, whole genome shotgun
sequence; 392955666; NZ_AKKV01000020.1
3944; Streptomyces sviceus ATCC 29083 chromosome, whole genome shotgun
sequence; 297196766; NZ_CM000951.1
3945; Paenibacillus sp. Aloe-11 GW8_15, whole genome shotgun sequence;
375307420; NZ_JH601049.1
3946; Streptomyces sp. W007 contig00293, whole genome shotgun sequence;
365867746; NZ_AGSW01000272.1
3947; Frankia saprophytica strain CN3 FrCN3DRAFT FCB.2, whole genome
shotgun sequence; 652876473; NZ_KI912267.1
3948; Desulfosporosinus youngiae DSM 17734 chromosome, whole genome
shotgun sequence; 374578721; NZ_CM001441.1
3949; Mooreaproducens 3L scf52054, whole genome shotgun sequence;
332710503; NZ_GL890955.1
3950; Pedobacter sp. BAL39 1103467000500, whole genome shotgun sequence;
149277003; NZ_ABCM01000004.1
3951; Pedobacter sp. BAL39 1103467000492, whole genome shotgun sequence;
149277373; NZ_ABCM01000005.1
3952; Sulfurovum sp. AR contig00449, whole genome shotgun sequence;
386284588; NZ_AJLE01000006.1
3953; Mucilaginibacter paludis DSM 18603 chromosome, whole genome shotgun
sequence; 373951708; NZ_CM001403.1
3954; Magnetospinllum caucaseum strain SO-1 contig00006, whole genome
shotgun sequence; 458904467; NZ_AONQ01000006.1
3955; Mooreaproducens 3L scf52052, whole genome shotgun sequence;
332710285; NZ_GL890953.1
3956; Cecembia lonarensis LW9 contig000133, whole genome shotgun sequence;
406663945; NZ_AMGM01000133.1
3957; Actinomyces sp. oral taxon 848 str. F0332 Scfld0, whole genome shotgun
sequence; 260447107; NZ_GG703879.1
3958; Actinomyces sp. oral taxon 848 str. F0332 Scfld0, whole genome shotgun
sequence; 260447107; NZ_GG703879.1
3959; Streptomyces ipomoeae 91-03 gcontig_1108499710267, whole genome
shotgun sequence; 429195484; NZ_AEJC01000118.1
3960; Streptomyces ipomoeae 91-03 gcontig_1108499715961, whole genome
shotgun sequence; 429196334; NZ_AEJC01000180.1
3961; Frankia sp. QA3 chromosome, whole genome shotgun sequence;
392941286; NZ_CM001489.1
3962; Fischerella thermalis PCC 7521 contig00099, whole genome shotgun
sequence; 484076371; NZ_AJLL01000098.1
3963; Rhodobacter sp. AKP1 contig19, whole genome shotgun sequence;
429208285; NZ_ANFS01000019.1
3964; Streptomyces chartreusis NRRL 12338 12338 Dorol_scaffold19, whole
genome shotgun sequence; 381200190; NZJH164855.1
3965; Streptomyces globisporus C-1027 Scaffold24_1, whole genome shotgun
sequence; 410651191; NZ_AJU001000171.1
3966; Sphingobium yanoikuyae XLDN2-5 contig000029, whole genome shotgun
sequence; 378759075; NZ_AFXE01000029.1
3967; Paenibacillus peonae KCTC 3763 contig9, whole genome shotgun
sequence; 389822526; NZ_AGFX01000048.1
3968; Citromicrobium sp. JLT1363 contig00009, whole genome shotgun
sequence; 341575924; NZ_AEUE01000009.1
3969; Acaryochloris sp. CCMEE 5410 contig00232, whole genome shotgun
sequence; 359367134; NZ_AFEJ01000154.1
3970; Pseudomonas extremaustralis 14-3 substr. 14-3b strain 14-3 contig00001,
whole genome shotgun sequence; 394743069; NZ_AHIP01000001.1
3971; Lunatimonas lonarensis strain AK24 S14_contig_18, whole genome
shotgun sequence; 499123840; NZ_AQHR01000021.1
3972; Mesorhizobium japonicum R7A MesloDRAFT_Scaffold1.1, whole
genome shotgun sequence; 696358903; NZ_KI632510.1
3973; Legionella pneumophila subsp. pneumophila ATCC 43290, complete
genome; 378775961; NC_016811.1
3974; Methylococcus capsulatus str. Texas = ATCC 19069 strain Texas
contig0129, whole genome shotgun sequence; 483090991;
NZ_AMCE01000064.1
3975; Thermobifida fusca TM51 contig028, whole genome shotgun sequence;
510814910; NZ_AOSG01000028.1
3976; Rhodospirillum rubrum F11, complete genome; 386348020; NC_017584.1
3977; Rhodospirillum rubrum F11, complete genome; 386348020; NC_017584.1
3978; Rhodospirillum rubrum F11, complete genome; 386348020; NC_017584.1
3979; Hahella chejuensis KCTC 2396, complete genome; 83642913; NC_007645.1
3980; Frankia sp. Thr ThrDRAFT_scaffold 28.29, whole genome shotgun
sequence; 602262270; JENI01000029.1
3981; Novosphingobium aromaticivorans DSM 12444, complete genome;
87198026; NC_007794.1
3982; Roseobacter denitnficans OCh 114, complete genome; 110677421; NC_008209.1
3983; Pelobacter propionicus DSM 2379, complete genome; 118578449; NC_008609.1
3984; Psychromonas ingrahamii 37, complete genome; 119943794; NC_008709.1
3985; Rhodobacter sphaeroides ATCC 17029 chromosome 1, complete sequence;
126460778; NC_009049.1
3986; Rhodobacter sphaeroides ATCC 17025, complete genome; 146276058;
NC_009428.1
3987; Geobacter uraniireducens Rf4, complete genome; 148262085; NC_009483.1
3988; Sphingomonas wittichii RW1, complete genome; 148552929; NC_009511.1
3989; Sulfurovum sp. NBC37-1 genomic DNA, complete genome; 152991597;
NC_009663.1
3990; Acaryochloris marina MBIC11017, complete genome; 158333233;
NC_009925.1
3991; Bacillus weihenstephanensis KBAB4, complete genome; 163938013;
NC_010184.1
3992; Bifidobacterium longum subsp infantis ATCC 15697, complete genome;
213690928; NC_011593.1
3993; Cyanothece sp. PCC 7425, complete genome; 220905643; NC_011884.1
3994; Streptococcus suis 98HAH33, complete genome; 145690656; CP000408.1
3995; Chitinophagapinensis DSM 2588, complete genome; 256419057;
NC_013132.1
3996; Rhodothermus marinus DSM 4252, complete genome; 268315578;
NC_013501.1
3997; Sanguibacter keddieii DSM 10542, complete genome; 269793358;
NC_013521.1
3998; Thermobaculum terrenum ATCC AA-798 chromosome 1, complete
sequence; 269925123; NC_013525.1
3999; Thermobaculum terrenum ATCC BAA-798 chromosome 2, complete
sequence; 269838913; NC_013526.1
4000; Xylanimonas cellulosilytica DSM 15894, complete genome; 269954810;
NC_013530.1
4001; Salinibacter ruber M8 chromosome, complete genome; 294505815;
NC_014032.1
4002; Salinibacter ruber M8 chromosome, complete genome; 294505815;
NC_014032.1
4003; Legionella pneumophila 2300/99 Alcoy, complete genome; 296105497;
NC_014125.1
4004; Amycolatopsis mediterranei S699, complete genome; 384145136;
NC_017186.1
4005; Butyrivibrio proteoclasticus B316 chromosome 1, complete sequence;
302669374; NC_014387.1
4006; Gallionella capsifeniformans ES-2, complete genome; 302877245;
NC_014394.1
4007; Paenibacillus polymyxa E681, complete genome; 864439741;
NC_014483.2
4008; Paenibacillus polymyxa 1-43 S143_contig00221, whole genome shotgun
sequence; 647225094; NZ_ASRZ01000173.1
4009; Mesorhizobium ciceri CMG6 MescicDRAFT_scaffold_1.2_C, whole
genome shotgun sequence; 639162053; NZ_AWZS01000002.1
4010; Teniglobus saanensis SP1PR4, complete genome; 320105246;
NC_014963.1
4011; Syntrophobotulus glycolicus DSM 8271, complete genome; 325288201;
NC_015172 .1
4012; Methanobacterium lacus strain AL-21, complete genome; 325957759;
NC_015216.1
4013; Marinomonas mediterranea MMB-1, complete genome; 326793322;
NC_015276.1
4014; Desuffobacca acetoxidans DSM 11109, complete genome; 328951746;
NC_015388.1
4015; Methylomonas methanica MC09, complete genome; 333981747;
B NC_015572.1
4016; Methylomonas methanica MC09, complete genome; 333981747;
NC_015572.1
4017; Methanobacterium paludis strain SWAN1, complete genome; 333986242;
NC_015574.1
4018; Mycobacterium sinense strain JDM601, complete genome; 333988640;
NC_015576.1
4019; Frankia coriariae strain BMG5.1 scaffold41.42, whole genome shotgun
sequence; 827465632; NZ_JWIO01000042.1
4020; Halopiger xanaduensis SH-6 plasmid pHALXA01, complete genome;
336251750; NC_015658.1

4021; Mesorhizobium opportunistum WSM2075, complete genome; 337264537;

NC_015675.1
4022; Runella slithyformis DSM 19594, complete genome; 338209545;
NC_015703.1
4023; Roseobacter litoralis Och 149, complete genome; 339501577;
NC_015730.1
4024; Streptomyces violaceusniger Tu 4113 plasmid pSTRVI01, complete
sequence; 345007457; NC_015951.1
4025; Streptomyces violaceusniger Tu 4113, complete genome; 345007964;
NC_015957.1
4026; Rhodothennus marinus SG0.5JP17-172, complete genome; 345301888;
NC_015966.1
4027; Chloracidobacterium thermophilum B chromosome 1, complete sequence;
347753732; NC_016024.1
4028; Kitasatospora setae KM-6054 DNA, complete genome; 357386972;
NC_016109.1
4029; Streptomyces bingchenggensis BCW-1, complete genome; 374982757;
NC_016582.1
4030; Desulfosporosinus orientis DSM 765, complete genome; 374992780;
NC_016584.1
4031; Desulfosporosinus orientis DSM 765, complete genome; 374992780;
NC_016584.1
4032; Paenibacillus tenae HPL-003, complete genome; 374319880;
NC_016641.1
4033; Bacillus megaterium WSH-002, complete genome; 384044176;
NC_017138.1
4034; Francisella cf. novicida 3523, complete genome; 387823583; NC_017449.1
4035; Streptomyces cattleya str. NRRL 8057 main chromosome, complete
genome; 357397620; NC_016111.1
4036; Streptococcus salivarius JI1V18777 complete genome; 387783149;
NC_017595.1
4037; Actinoplanes sp. SE50/110, complete genome; 386845069; NC_017803.1
4038; Tistrella mobilis KA081020-065 plasmid pTM1, complete sequence;
442559580; NC_017957.2
4039; Tistrella mobilis KA081020-065 plasmid pTM3, complete sequence;
389874236; NC_017958.1
4040; Tistrella mobilis KA081020-065 plasmid pTM3, complete sequence;
389874236; NC_017958.1
4041; Legionella pneumophila subsp. pneumophila str. Lorraine chromosome,
complete genome; 397662556; NC_018139.1
4042; Nocardiopsis sp. TP-A0876 strain NBRC 110039, whole genome shotgun
sequence; 754924215; NZ_BAZE01000001.1
4043; Emticicia oligotrophica DSM 17448, complete genome; 408671769;
NC_018748.1
4044; Saccharothrix espanaensis DSM 44229 complete genome; 433601838;
NC_019673.1
4045; Saccharothrix espanaensis DSM 44229 complete genome; 433601838;
NC_019673.1
4046; Nostoc sp. PCC 7107, complete genome; 427705465; NC_019676.1
4047; Nostoc sp. PCC 7107, complete genome; 427705465; NC_019676.1
4048; Rivularia sp. PCC 7116, complete genome; 427733619; NC_019678.1
4049; Rivularia sp. PCC 7116, complete genome; 427733619; NC_019678.1
4050; Synechococcus sp. PCC 6312, complete genome; 427711179;
NC_019680.1
4051; Synechococcus sp. PCC 6312, complete genome; 427711179;
NC_019680.1
4052; Nostoc sp. PCC 7524, complete genome; 427727289; NC_019684.1
4053; Calothrix sp. PCC 6303, complete genome; 428296779; NC_019751.1
4054; Crinalium epipsammum PCC 9333, complete genome; 428303693;
NC_019753.1
4055; Thermobacillus composti KWC4, complete genome; 430748349;
NC_019897.1
4056; Mesorhizobium sp. LNHC220B00 scaffold0002, whole genome shotgun
sequence; 563576979; NZ_AYWS01000002.1
4057; Bacillus sp. 1NLA3E, complete genome; 488570484; NC_021171.1
4058; Streptomyces davawensis strain JCM 4913 complete genome; 471319476;
NC_020504.1
4059; Streptomyces davawensis strain JCM 4913 complete genome; 471319476;
NC_020504.1
4060; Desulfotomaculum acetoxidans DSM 771, complete genome; 258513366;
NC_013216.1
4061; Desulfotomaculum acetoxidans DSM 771, complete genome; 258513366;
NC_013216.1
4062; Actinosynnema mirum DSM 43827, complete genome; 256374160;
NC_013093.1
4063; Bacillus cereus BAG20-3 acfXF-supercont1.1, whole genome shotgun
sequence; 507017505; NZ_KB976530.1
4064; Bacillus cereus HuA3-9 acqVv-supercont1.4, whole genome shotgun
sequence; 507024338; NZ_KB976146.1
4065; Bacillus cereus VD118 acrHo-supercont1.9, whole genome shotgun
sequence; 507035131; NZ_KB976800.1
4066; Bacillus cereus VDM006 acrHb-supercont1.1, whole genome shotgun
sequence; 507060269; NZ_KB976864.1
4067; Bacillus cereus VDM019 acluj-supercont1.2, whole genome shotgun
sequence; 507056808; NZ_KB976199.1
4068; Bacillus cereus VDM053 acrGS-supercont1.7, whole genome shotgun
sequence; 507060152; NZ_KB976714.1
4069; Halomonas anticaliensis FP35 = DSM 16096 strain FP35 Scaffold 1, whole
genome shotgun sequence; 514429123; NZ_KE332377.1
4070; Streptomyces sp. NRRL F-5917 contig68.1, whole genome shotgun
sequence; 663414324; NZ_JOHQ01000068.1
4071; Streptomyces aurantiacus JA 4570 Seq17, whole genome shotgun sequence;
514916021; NZ_AOPZ01000017.1
4072; Streptomyces aurantiacus JA 4570 Seq63, whole genome shotgun sequence;
514917321; NZ_AOPZ01000063.1
4073; Streptomyces aurantiacus JA 4570 Seq109, whole genome shotgun
sequence; 514918665; NZ_AOPZ01000109.1
4074; Paenibacillus polymyxa OSY-DF Contig136, whole genome shotgun
sequence; 484036841; NZ_AIPP01000136.1
4075; Fischerella muscicola SAG 1427-1 = PCC 73103 contig00215, whole
genome shotgun sequence; 484073367; NZ_AJLJ01000207.1
4076; Fischerella muscicola PCC 7414 contig00109, whole genome shotgun
sequence; 484075173; NZ_AJLK01000109.1
4077; Fischerella muscicola PCC 7414 contig00153, whole genome shotgun
sequence; 484075372; NZ_AJLK01000153.1
4078; Pedobacter arcticus A12 Scaffold2, whole genome shotgun sequence;
484345004; NZ_JH947126.1
4079; Leptolyngbyaboryana PCC 6306 LepboDRAFT LPC.1, whole genome
shotgun sequence; 482909028; NZ_KB731324.1
4080; Mastigocladus laminosus UU774 scaffold 22, whole genome shotgun
sequence; 764671177; NZ_JX1101000139.1
4081; Fischerella sp. PCC 9339 PCC9339DRAFT_scaffold1.1, whole genome
shotgun sequence; 482909394; NZ_JI4992898.1
4082; Lactococcus garvieae Tac2 Tac2Contig_33, whole genome shotgun
sequence; 483258918; NZ_AMFE01000033.1
4083; Paenisporosarcina sp. TG-14 111.TG14.1_1, whole genome shotgun
sequence; 483299154; NZ_AMGD01000001.1
4084; Paenibacillus sp. ICGEB2008 Contig_7, whole genome shotgun sequence;
483624383; NZ_AMQUO1000007.1
4085; Amphibacillus jilinensis Y1 Scaffold2, whole genome shotgun sequence;
483992405; NZ__M976435.1
4086; Nocardiopsis alba DSM 43377 contig 34, whole genome shotgun
sequence; 484007204; NZ_ANAC01000034.1
4087; Nocardiopsis halophila DSM 44494 contig 138, whole genome shotgun
sequence; 484007841; NZ_ANAD01000138.1
4088; Nocardiopsis halophila DSM 44494 contig 138, whole genome shotgun
sequence; 484007841; NZ_ANAD01000138.1
4089; Nocardiopsis halophila DSM 44494 contig 197, whole genome shotgun
sequence; 484008051; NZ_ANAD01000197.1
4090; Nocardiopsis baichengensis YIM 90130 Scaffold15_1, whole genome
shotgun sequence; 484012558; NZ_ANAS01000033.1
4091; Nocardiopsis halotolerans DSM 44410 contig 26, whole genome shotgun
sequence; 484015294; NZ_ANAX01000026.1
4092; Nocardiopsis salina YIM 90010 contig 204, whole genome shotgun
sequence; 484023808; NZ_ANBF01000204.1
4093; Nocardiopsis chromatogenes YIM 90109 contig 59, whole genome
shotgun sequence; 484026076; NZ_ANBH01000059.1
4094; Nocardiopsis chromatogenes YIM 90109 contig 93, whole genome
shotgun sequence; 484026206; NZ_ANBH01000093.1
4095; Porphyrobacter sp. AAP82 Contig35, whole genome shotgun sequence;
484033307; NZ_ANFX01000035.1
4096; Blastomonas sp. AAP53 Contig14, whole genome shotgun sequence;
484033631; NZ_ANFZ01000014.1
4097; Paenibacillus sp. PAMC 26794 5104_29, whole genome shotgun sequence;
484070054; NZ_ANHX01000029.1
4098; Oscillatoria sp. PCC 10802 Osc10802DRAFT_Contig7.7, whole genome
shotgun sequence; 484104632; NZ_KB235948.1
4099; Clostridium botulinum CB11/1-1 CB contig00105, whole genome shotgun
sequence; 484141779; NZ_AORM01000006.1
4100; Actinopolyspora halophila DSM 43834 ActhaDRAFT_contig1.1_C, whole
genome shotgun sequence; 484203522; NZ_AQUI01000002.1
4101; Streptomyces sp. FxanaC1 B074DRAFT scaffold_1.2_C, whole genome
shotgun sequence; 484227180; NZ_AQW001000002.1
4102; Smaragdicoccus niigatensis DSM 44881 = NBRC 103563 strain DSM
44881 F600DRAFT_scaffold00011.11_C, whole genome shotgun sequence;
484234624; NZ_AQXZ01000009.1
4103; Verrucomicrobium sp. 3C A37ADRAFT_scaffold1.1, whole genome
shotgun sequence; 483219562; NZ_KB901875.1
4104; Verrucomicrobium sp. 3C A37ADRAFT_scaffold1.1, whole genome
shotgun sequence; 483219562; NZ_KB901875.1
4105; Ancylobacter sp. FA202 A3M1DRAFT_scaffold1.1, whole genome
shotgun sequence; 483720774; NZ_KB904818.1
4106; Filamentous cyanobacterium ESFC-1 A3MYDRAFT_scaffold1.1, whole
genome shotgun sequence; 483724571; NZ_KB904821.1
4107; Streptomyces sp. CcalMP-8W B053DRAFT_scaffold_17.18, whole
genome shotgun sequence; 483961830; NZ_KB890924.1
4108; Streptomyces sp. ScaeMP-e10 B061DRAFT_scaffold_01, whole genome
shotgun sequence; 483967534; NZ_KB891296.1
4109; Streptomyces sp. CNB091 D581DRAFT_scaffold00010.10, whole genome
shotgun sequence; 484070161; NZ_KB898999.1
4110; Streptomyces sp. T0R3209 Contig613, whole genome shotgun sequence;
484867902; NZ_AGNH01000613.1
4111; Bacillus oceanisediminis 2691 contig2644, whole genome shotgun
sequence; 485048843; NZ_ALEG01000067.1
4112; Bacillus sp. REN51N contig 2, whole genome shotgun sequence;
748816024; NZ_JXAB01000002.1
4113; Calothrix sp. PCC 7103 Ca17103DRAFT_CPM.6, whole genome shotgun
sequence; 485067373; NZ_KB217478.1
4114; Pseudanabaena sp. PCC 6802 Pse6802_scaffold_5, whole genome shotgun
sequence; 485067426; NZ_KB235914.1
4115; Actinomadura atramentaria DSM 43919 strain SF2197
G339DRAFT_scaffold00002.2, whole genome shotgun sequence; 485090585;
NZ_KB907209.1
4116; Novispirillum itersonii subsp. itersonii ATCC 12639
G365DRAFT_scaffold00001.1, whole genome shotgun sequence; 485091510;
NZ_KB907337.1
4117; Novispirillum itersonii subsp. itersonii ATCC 12639
G365DRAFT_scaffold00001.1, whole genome shotgun sequence; 485091510;
NZ_KB907337.1
4118; Paenibacillus polymyxa ATCC 842 PPt02_scaffold1, whole genome
shotgun sequence; 485269841; NZ_GL905390.1
4119; Streptomyces sp. SolWspMP-so12th B083DRAFT_scaffold_17.18_C,
whole genome shotgun sequence; 654969845; NZ_ARPF01000020.1
4120; Mesorhizobium hualcuii 7653R genome; 657121522; CP006581.1
4121; Paenibacillus sp. FIW567 B212DRAFT_scaffold1.1, whole genome
shotgun sequence; 486346141; NZ_KB910518.1
4122; Bacillus sp. 123MFChir2 H280DRAFT_scaffold00030.30, whole genome
shotgun sequence; 487368297; NZ_KB910953.1
4123; Streptomyces canus 299MFChir4.1 H293DRAFT_scaffold00032.32, whole
genome shotgun sequence; 487385965; NZ_KB911613.1
4124; Nocardiopsis potens DSM 45234 contig 25, whole genome shotgun
sequence; 484017897; NZ_ANBB01000025.1
4125; Kribbella catacumbae DSM 19601 A3ESDRAFT_scaffold_7.8S, whole
genome shotgun sequence; 484207511; NZ_AQUZ01000008.1
4126; Paenibacillus riograndensis SBR5 Contig78, whole genome shotgun
sequence; 485470216; NZ_A
4127; Lamprocystis purpurea DSM 4197 A390DRAFT_scaffold_01, whole
genome shotgun sequence; 483254584; NZ_KB902362.1
4128; Nonomumea coxensis DSM 45129 A3G7DRAFT_scaffold_4.5, whole
genome shotgun sequence; 483454700; NZ_KB903974.1
4129; Spirosoma spitsbergense DSM 19989 B157DRAFT_scaffold_76.77, whole
genome shotgun sequence; 483994857; NZ_KB893599.1
4130; Amycolatopsis benzoatilytica AK 16/65 AmybeDRAFT_scaffold1.1, whole
genome shotgun sequence; 486399859; NZ_KB912942.1
4131; Amycolatopsis nigrescens CSC17Ta-90 AmyniDRAFT Contig68.1_C,
whole genome shotgun sequence; 487404592; NZ_ARVW01000001.1
4132; Amycolatopsis nigrescens CSC17Ta-90 AmyniDRAFT Contig68.1S,
whole genome shotgun sequence; 487404592; NZ_ARVW01000001.1
4133; Reyranella massiliensis 521, whole genome shotgun sequence; 484038067;
NZ_HE997181.1
4134; Acidobacteriaceae bacterium KBS 83 GO02DRAFT scaffold00007.7,
whole genome shotgun sequence; 485076323; NZ_KB906739.1
4135; Paenibacillus alvei A6-6i-x PAAL66ix_14, whole genome shotgun
sequence; 528200987; ATMS01000061.1
4136; Dehalobacter sp. UNSWDHB Contig 139, whole genome shotgun
sequence; 544905305; NZ_AUUR01000139.1
4137; Thermoactinomyces vulgaris strain NRRL F-5595 F5595contig15.1, whole
genome shotgun sequence; 929862756; NZ_LGKI01000090.1
4138; Clostridium saccharobutylicum DSM 13864, complete genome;
550916528; NC_022571.1
4139; Butyrivibrio fibrisolvens AB2020 G616DRAFT scaffold00015.15_C,
whole genome shotgun sequence; 551012921; NZ_ATVZ01000015.1
4140; Butyrivibrio sp. XPD2006 G590DRAFT scaffold00008.8S, whole
genome shotgun sequence; 551021553; NZ_ATVT01000008.1
4141; Acidobacteriaceae bacterium TAA166 strain TAA 166
H979DRAFT scaffold 0.1S, whole genome shotgun sequence; 551216990;
NZ_ATWD01000001.1
4142; Acidobacteriaceae bacterium TAA166 strain TAA 166
H979DRAFT scaffold 0.1S, whole genome shotgun sequence; 551216990;
NZ_ATWD01000001.1
4143; Leptolyngbya sp. Heron Island J 50, whole genome shotgun sequence;
553739852; NZ_AWNH01000066.1
4144; Leptolyngbya sp. Heron Island J 50, whole genome shotgun sequence;
553739852; NZ_AWNH01000066.1
4145; Leptolyngbya sp. Heron Island J 67, whole genome shotgun sequence;
553740975; NZ_AWNH01000084.1
4146; Rothia aeria F0184 R aeriaFIMPREF0742-1.0_Cont136.4, whole genome
shotgun sequence; 551695014; AXZGO1000035.1
4147; Gloeobacter kilaueensis JS1, complete genome; 554634310; NC_022600.1
4148; Gloeobacter kilaueensis JS1, complete genome; 554634310; NC_022600.1
4149; Asticcacaulis sp. AC466 contig00033, whole genome shotgun sequence;
557835508; NZ_AWGE01000033.1
4150; Streptomyces niveus NCIMB 11891 contig00003, whole genome shotgun
sequence; 558542923; AWQW01000003.1
4151; Streptomyces roseochromogenus subsp. oscitans DS 12.976 chromosome,
whole genome shotgun sequence; 566155502; NZ_CM002285.1
4152; Streptomyces roseochromogenus subsp. oscitans DS 12.976 chromosome,
whole genome shotgun sequence; 566155502; NZ_CM002285.1
4153; Bacillus boroniphilus JCM 21738 DNA, contig: contig_6, whole genome
shotgun sequence; 571146044; BAUW01000006.1
4154; Mesorhizobium sp. LSJC285A00 scaffold0007, whole genome shotgun
sequence; 563442031; NZ_AYVK01000007.1
4155; Mesorhizobium sp. LSJC277A00 scaffold0014, whole genome shotgun
sequence; 563459186; NZ_AYVM01000014.1
4156; Mesorhizobium sp. LNJC405B00 scaffold0005, whole genome shotgun
sequence; 563523441; NZ_AYWC01000005.1
4157; Mesorhizobium sp. LSJC265A00 scaffold0015, whole genome shotgun
sequence; 563472037; NZ_AYVP01000015.1
4158; Mesorhizobium sp. LSHC426A00 scaffold0005, whole genome shotgun
sequence; 563492715; NZ_AYVV01000005.1
4159; Mesorhizobium sp. LNHC232B00 scaffold0020, whole genome shotgun
sequence; 563561985; NZ_AYWP01000020.1
4160; Mesorhizobium sp. L48CO26A00 scaffold0030, whole genome shotgun
sequence; 563848676; NZ_AYWU01000030.1
4161; Mesorhizobium sp. L2C089B000 scaffold0011, whole genome shotgun
sequence; 563888034; NZ_AYWV01000011.1
4162; Mesorhizobium sp. L2C084A000 scaffold0007, whole genome shotgun
sequence; 563938926; NZ_AYWX01000007.1
4163; Closltidium pasteurianum NRRL B-598, complete genome; 930593557;
NZ_CP011966.1
4164; Paenibacillus polymyxa CR1, complete genome; 734699963; NC_023037.2
4165; Closltidium butyricum DORA 1 Q607 CBUC00058, whole genome
shotgun sequence; 566226100; AZLX01000058.1
4166; Streptococcus suis strain LS8F, whole genome shotgun sequence;
766589647; NZ_CEHJ01000007.1
4167; Mycobacterium sp. UM Kg27 contig000002, whole genome shotgun
sequence; 809025315; NZ_JRMM01000002.1
4168; Mycobacterium iranicum UM TJL Contig 42, whole genome shotgun
sequence; 638987534; NZ_AUWT01000042.1
4169; Paenibacillus sp. MAEPY2 contig7, whole genome shotgun sequence;
639451286; NZ_AWUK01000007.1
4170; Verrucomicrobia bacterium LP2A G346DRAFT_scf7180000000012_quiver.2_C,
whole genome shotgun sequence; shotgun sequence;
640169055; NZ_JAFS01000002.1
4171; Verrucomicrobia bacterium LP2A G346DRAFT_scf7180000000012_quiver.2_C,
whole genome shotgun sequence; 640169055; NZ_JAFS01000002.1
4172; Bacillus mannanilyticus JCM 10596, whole genome shotgun sequence;
640600411; NZ_BAM001000071.1
4173; Bifidobacterium breve NCFB 2258, complete genome; 749295448;
NZ_CP006714.1
4174; Haloglycomyces albus DSM 45210 HalaIDRAFT_chromosome1.1_C,
whole genome shotgun sequence; 644043488; NZ_AZUQ01000001.1
4175; Kutzneria albida strain NRRL B-24060 contig305.1, whole genome shotgun
sequence; 662161093; NZ_JNYHO1000515.1
4176; Kutzneria albida strain NRRL B-24060 contig305.1, whole genome shotgun
sequence; 662161093; NZ_JNYH01000515.1
4177; Kutzneria albida DSM 43870, complete genome; 754862786;
NZ_CP007155.1
4178; Paenibacillus sp. 1-49 S149_contig00281, whole genome shotgun sequence;
647230448; NZ_ASRY01000102.1
4179; Paenibacillus graminis RSA19 S2_contig00597, whole genome shotgun
sequence; 647256651; NZ_ASSG01000304.1
4180; Paenibacillus sp. 1-18 S118_contig00103, whole genome shotgun sequence;
647269417; NZ_ASSB01000031.1
4181; Paenibacillus polymyxa TD94 STD94_contig00759, whole genome
shotgun sequence; 647274605; NZ_ASSA01000134.1
4182; Bacillus flexus T6186-2 contig 106, whole genome shotgun sequence;
647636934; NZ_JANV01000106.1
4183; Mastigocladopsis repens PCC 10914 Mas10914DRAFT_scaffold1.1, whole
genome shotgun sequence; 482909462; NZJH992901.1
4184; Streptomyces sp. FxanaC1 B074DRAFT_scaffold_7.8_C, whole genome
shotgun sequence; 484227195; NZ_AQW001000008.1
4185; Streptomyces sp. HmicAl2 B072DRAFT_scaffold_19.20, whole genome
shotgun sequence; 483972948; NZ_KB891808.1
4186; Butyrivibrio sp. XPD2002 G587DRAFT_scaffold00011.11, whole genome
shotgun sequence; 651381584; NZ_KE384117.1
4187; Butyrivibrio sp. NC3005 G634DRAFT scaffold00001.1, whole genome
651394394; NZ_KE384206.1
4188; Paenarthrobacter nicotinovorans 231Sha2.1M6I960DRAFT_scaffold00004.4_C,
whole genome shotgun sequence; 651445346; NZ_AZVC01000006.1
4189; Bacillus sp. J37 BacJ37DRAFT_scaffold_0.1_C, whole genome shotgun
sequence; 651516582; NZ_JAEK01000001.1
4190; Bacillus sp. UNC437CL72CviS29 M014DRAFT_scaffold00009.9_C,
whole genome shotgun sequence; 651596980; NZ_AXVB01000011.1
4191; Bacillus bogoriensis ATCC BAA-922 T323DRAFT_scaffold00008.8_C,
whole genome shotgun sequence; 651937013; NZJHYI01000013.1
4192; Bacillus kribbensis DSM 17871 H539DRAFT_scaffold00003.3, whole
genome shotgun sequence; 651983111; NZ_KE387239.1
4193; Fischerella sp. PCC 9431 Fis9431DRAFT_Scaffold1.2, whole genome
shotgun sequence; 652326780; NZ_KE650771.1
4194; Fischerella sp. PCC 9605 FIS9605DRAFT_scaffold2.2, whole genome
shotgun sequence; 652337551; NZ_K1912149.1
4195; Clostridium akagii DSM 12554 BR66DRAFT_scaffold00010.10_C, whole
genome shotgun sequence; 652488076; NZ_JMLK01000014.1
4196; Closltidium beijerinckii HUN142 T483DRAFT_scaffold00004.4, whole
genome shotgun sequence; 652494892; NZ_KK211337.1
4197; Mesorhizobium sp. URHA0056 H959DRAFT scaffold00004.4_C, whole
genome shotgun sequence; 652670206; NZ_AUEL01000005.1
4198; Mesorhizobium loti R88b Meslo2DRAFT_Scaffold1.1, whole genome
shotgun sequence; 652688269; NZ_KI912159.1
4199; Mesorhizobium ciceri W5M4083 MESCI2DRAFT_scaffold_0.1, whole
genome shotgun sequence; 652698054; NZ_KI912610.1
4200; Mesorhizobium sp. URHC0008 N549DRAFT_scaffold00001.1_C, whole
genome shotgun sequence; 652699616; NZ_JIAP01000001.1
4201; Mesorhizobium erdmanii USDA 3471 A3AUDRAFT_scaffold_7.8_C,
whole genome shotgun sequence; 652719874; NZ_AXAE01000013.1
4202; Mesorhizobium loti CJ3sym A3A9DRAFT_scaffold 25.26_C, whole
genome shotgun sequence; 652734503; NZ_AXAL01000027.1
4203; Cohnella thermotolerans DSM 17683 G485DRAFT_scaffold00041.41_C,
whole genome shotgun sequence; 652787974; NZ_AUCP01000055.1
4204; Mesorhizobium sp. WSM3626 Mesw3626DRAFT_scaffold_6.7_C, whole
genome shotgun sequence; 652879634; NZ_AZUY01000007.1
4205; Mesorhizobium sp. W5M1293 MesloDRAFT scaffold 4.5, whole genome
shotgun sequence; 652910347; NZ_KI911320.1
4206; Mesorhizobium sp. W5M3224 YU3DRAFT_scaffold_3.4_C, whole
genome shotgun sequence; 652912253; NZ_ATY001000004.1
4207; Butyrivibrio fibrisolvens MD2001 G635DRAFT_scaffold00033.33_C,
whole genome shotgun sequence; 652963937; NZ_AUKDO1000034.1
4208; Legionella pneumophila subsp. pneumophila strain ATCC 33155
contig032, whole genome shotgun sequence; 652971687; NZ_JFIN01000032.1
4209; Legionella pneumophila subsp. pneumophila strain ATCC 33154 5caffold2,
whole genome shotgun sequence; 653016013; NZ_KK074241.1
4210; Legionella pneumophila subsp. pneumophila strain ATCC 33823 5caffold7,
whole genome shotgun sequence; 653016661; NZ_KK074199.1
4211; Bacillus sp. URHB0009 H980DRAFT_scaffold00016.16_C, whole
genome shotgun sequence; 653070042; NZ_AUER01000022.1
4212; Lachnospira multipara ATCC 19207 G600DRAFT_scaffold00009.9_C,
whole genome shotgun sequence; 653218978; NZ_AUJG01000009.1
4213; Streptomyces sp. CNH099 B121DRAFT_scaffold_16.17_C, whole
genome shotgun sequence; 654239557; NZ_AZWL01000018.1
4214; Desulfatiglans anilini DSM 4660 H567DRAFT_scaffold00005.5_C, whole
genome shotgun sequence; 654868823; NZ_AULM01000005.1
4215; Legionella pneumophila subsp. fraseri strain ATCC 35251 contig031, whole
genome shotgun sequence; 654928151; NZ_JFIG01000031.1
4216; Bacillus sp. FJAT-14578 5caffold2, whole genome shotgun sequence;
654948246; NZ_K1632505.1
4217; Bacillus sp. 278922_107 H622DRAFT_scaffold00001.1, whole genome
shotgun sequence; 654964612; NZ_KI911354.1
4218; Ruminococcus flavefaciens ATCC 19208 L870DRAFT_scaffold00001.1,
whole genome shotgun sequence; 655069822; NZ_KI912489.1
4219; Paenibacillus taiwanensis DSM 18679 H.509DRAFT_scaffold00010.10_C,
whole genome shotgun sequence; 655095554; NZ_AULE01000001.1
4220; Paenibacillus sp. UNC451MF BP97DRAFT_scaffold00018.18_C, whole
genome shotgun sequence; 655103160; NZ_JMLS01000021.1
4221; Paenibacillus pinihumi DSM 23905 = JCM 16419 strain DSM 23905
H583DRAFT_scaffold00005.5, whole genome shotgun sequence; 655115689;
NZ_KE383867.1
4222; Paenibacillus harenae DSM 16969 H581DRAFT scaffold00002.2, whole
genome shotgun sequence; 655165706; NZ_KE383843.1
4223; Shimazuella kribbensis DSM 45090 A3GQDRAFT_scaffold_0.1S, whole
genome shotgun sequence; 655370026; NZ_ATZFO1000001.1
4224; Shimazuella kribbensis DSM 45090 A3GQDRAFT_scaffold_5.6_C, whole
genome shotgun sequence; 655371438; NZ_ATZFO1000006.1
4225; Streptomyces flavidovirens DSM 40150 G412DRAFT_scaffold00007.7_C,
whole genome shotgun sequence; 655414006; NZ_AUBE01000007.1
4226; Streptomyces flavidovirens DSM 40150 G412DRAFT_scaffold00009.9,
whole genome shotgun sequence; 655416831; NZ_KE386846.1
4227; Azospirillum halopraeferens DSM 3675 G472DRAFT_scaffold00039.39_C,
whole genome shotgun sequence; 655967838; NZ_AUCF01000044.1
4228; Closltidium scatologenes strain ATCC 25775, complete genome;
802929558; NZ_CP009933.1
4229; Paenibacillus harenae DSM 16969 H581DRAFT_scaffold00004.4, whole
genome shotgun sequence; 656245934; NZ_KE383845.1
4230; Paenibacillus alginolyticus DSM 5050 = NBRC 15375 strain DSM 5050
G519DRAFT_scaffold00043.43_C, whole genome shotgun sequence;
656249802; NZ_AUGY01000047.1
4231; Paenibacillus alginolyticus DSM 5050 = NBRC 15375 strain DSM 5050
G519DRAFT_scaffold00043.43_C, whole genome shotgun sequence;
656249802; NZ_AUGY01000047.1
4232; Bacillus indicus strain DSM 16189 Contig01, whole genome shotgun
sequence; 737222016; NZ_JNVCO2000001.1
4233; Bacillus sp. RP1137 contig 18, whole genome shotgun sequence;
657210762; NZ_AXZS01000018.1
4234; Streptomyces leeuwenhoekii strain C34(2013) c34_sequence_0012, whole
genome shotgun sequence; 657294764; NZ_AZSD01000012.1
4235; Streptomyces leeuwenhoekii strain C34(2013) c34_sequence_0041, whole
genomeshotgun sequence; 657295264; NZ_AZSD01000040.1
4236; Streptomyces leeuwenhoekii strain C58 contig69, whole genome shotgun
sequence; 873282617; NZ_LFEH01000068.1
4237; Bacillus thuringiensis LM1212 scaffold 08, whole genome shotgun
sequence; 657629081; NZ_AYPV01000024.1
4238; Paenibacillus polymyxa strain WLY78 S6_contig00095, whole genome
shotgun sequence; 657719467; NZ_ALN01000094.1
4239; [Scytonema hofmanni] UTEX 2349 To19009DRAFT_TPD.8, whole
genome shotgun sequence; 657935980; NZ_KK073768.1
4240; Sphingomonas sp. DC-6 scaffold87, whole genome shotgun sequence;
662140302; NZ_JMUB01000087.1
4241; Streptomyces lavendulae strain Fujisawa #8006 contig417.1, whole genome
shotgun sequence; 662043624; NZ_JNXL01000469.1
4242; Streptomyces sp. NRRL WC-3773 contig36.1, whole genome shotgun
sequence; 664487325; NZ_J01101000036.1
4243; Streptomyces flavotricini strain NRRL B-5419 contig237.1, whole genome
shotgun sequence; 662063073; NZ_JNXV01000303.1
4244; Streptomyces peruviensis strain NRRL ISP-5592 P181_Doro1_scaffold152,
whole genome shotgun sequence; 662097244; NZ_KL575165.1
4245; Streptomyces natalensis ATCC 27448 Scaffold 33, whole genome shotgun
sequence; 764439507; NZ_JRKI01000027.1
4246; Streptomyces decoyicus strain NRRL ISP-5087 P056_Doro1_scaffold78,
whole genome shotgun sequence; 662133033; NZ_KL570321.1
4247; Streptomyces baamensis strain NRRL B-2842 P144_Doro1_scaffold26,
whole genome shotgun sequence; 662135579; NZ_KL573564.1
4248; Streptomyces vinaceus strain NRRL ISP-5257 contig5.1, whole genome
shotgun sequence; 759527818; NZ_JNYP01000005.1
4249; Spirillospora albida strain NRRL B-3350 contig1.1, whole genome shotgun
sequence; 663122276; NZ_JOFJ01000001.1
4250; Streptomyces sp. NRRL S-455 contig1.1, whole genome shotgun sequence;
663192162; NZ_JOCT01000001.1
4251; Streptomyces sp. NRRL S-87 contig69.1, whole genome shotgun sequence;
663169513; NZ_JO
4252; Streptomyces katrae strain NRRL B-16271 contig33.1, whole genome
shotgun sequence; 663300513; NZ_JNZY01000033.1
4253; Streptomyces katrae strain NRRL B-16271 contig37.1, whole genome
shotgun sequence; 663300941; NZ_JNZY01000037.1
4254; Streptomyces sp. NRRL B-3229 contig5.1, whole genome shotgun
sequence; 663316931; NZ_JOGP01000005.1
4255; Streptomyces ruber strain NRRL B-1661 contig94.1, whole genome
shotgun sequence; 663365281; NZ_JODN01000094.1
4256; Streptomyces roseoverticillatus strain NRRL B-3500 contig22.1, whole
genome shotgun sequence; 663372343; NZ_JOFL01000022.1
4257; Streptomyces roseoverticillatus strain NRRL B-3500 contig43.1, whole
genome shotgun sequence; 663373497; NZ_JOFL01000043.1
4258; Streptomyces rimosus subsp. rimosus strain NRRL WC-3869
P248contig20.1, whole genome shotgun sequence; 925322461;
LGCQ01000113.1
4259; Streptomyces sp. NRRL B-12105 contig1.1, whole genome shotgun
sequence; 663380895; NZ_JNZW01000001.1
4260; Streptomyces sp. NRRL S-1448 contig134.1, whole genome shotgun
sequence; 663421576; NZ_JOGE01000134.1
4261; Allokutzneria albata strain NRRL B-24461 contig22.1, whole genome
shotgun sequence; 663596322; NZ_JOEF01000022.1
4262; Herbidospora cretacea strain NRRL B-16917 contig7.1, whole genome
shotgun sequence; 663670981; NZ_JODQ01000007.1
4263; Nocardia sp. NRRL WC-3656 contig2.1, whole genome shotgun sequence;
663737675; NZ_JOJF01000002.1
4264; Streptomyces aureocirculatus strain NRRL ISP-5386 contig11.1, whole
genome shotgun sequence; 664013282; NZ_JOAP01000011.1
4265; Streptomyces cyaneofuscatus strain NRRL B-2570 contig9.1, whole
genome shotgun sequence; 664021017; NZ_JOEM01000009.1
4266; Streptomyces aureocirculatus strain NRRL ISP-5386 contig49.1, whole
genome shotgun sequence; 664026629; NZ_JOAP01000049.1
4267; Streptomyces sclerotialus strain NRRL B-2317 contig7.1, whole genome
shotgun sequence; 664034500; NZ_JODX01000007.1
4268; Streptomyces anulatus strain NRRL B-2873 contig21.1, whole genome
shotgun sequence; 664049400; NZ_JOEZ01000021.1
4269; Streptomyces globisporus subsp. globisporus strain NRRL B-2709
contig24.1, whole genome shotgun sequence; 664051798; NZ_JNZK01000024.1
4270; Streptomyces rimosus subsp. rimosus strain NRRL B-2660 contig14.1,
whole genome shotgun sequence; 664052786; NZ_JOES01000014.1
4271; Streptomyces achromogenes subsp. achromogenes strain NRRL B-2120
contig2.1, whole genome shotgun sequence; 664063830; NZ_JODT01000002.1
4272; Streptomyces rimosus subsp. rimosus strain NRRL B-2660 contig124.1,
whole genome shotgun sequence; 664066234; NZ_JOES01000124.1
4273; Streptomyces rimosus subsp. rimosus strain NRRL WC-3927 contig5.1,
whole genome shotgun sequence; 664091759; NZ_JOB001000005.1
4274; Streptomyces rimosus subsp. rimosus strain NRRL WC-3904 contig10.1,
whole genome shotgun sequence; 664126885; NZ_JOCQ01000010.1
4275; Streptomyces rimosus subsp. rimosus strain NRRL WC-3904 contig106.1,
whole genome shotgun sequence; 664141810; NZ_JOCQ01000106.1
4276; Streptomyces sp. NRRL F-2295 P395contig79.1, whole genome shotgun
sequence; 926288193; NZ_LGCY01000146.1
4277; Streptomyces lavenduligriseus strain NRRL ISP-5487 contig2.1, whole
genome shotgun sequence; 664244706; NZ_JOBD01000002.1
4278; Streptomyces lavenduligriseus strain NRRL ISP-5487 contig2.1, whole
genome shotgun sequence; 664244706; NZ_JOBD01000002.1
4279; Streptomyces alboniger strain NRRL B-1832 B-1832_contig_384, whole
genome shotgun sequence; 943899498; NZ_LIQN01000384.1
4280; Streptomyces sp. NRRL S-337 contig31.1, whole genome shotgun
sequence; 664275807; NZ_JOIX01000031.1
4281; Streptomyces sp. NRRL S-337 contig41.1, whole genome shotgun
sequence; 664277815; NZ_JOIX01000041.1
4282; Streptomyces hygroscopicus subsp. hygroscopicus strain NRRL B-1477
contig8.1, whole genome shotgun sequence; 664299296; NZ_JOIK01000008.1
4283; Streptomyces sp. NRRL F-4474 contig32.1, whole genome shotgun
sequence; 664323078; NZ_JOIB01000032.1
4284; Streptomyces sp. NRRL S-475 contig32.1, whole genome shotgun
sequence; 664325162; NZ_JOJB01000032.1
4285; Streptomyces sp. NRRL S-1868 contig54.1, whole genome shotgun
sequence; 664360925; NZ_JOGD01000054.1
4286; Streptomyces sp. NRRL S-646 contig23.1, whole genome shotgun
sequence; 664421883; NZ_JODC01000023.1
4287; Streptomyces sp. NRRL S-1813 contig13.1, whole genome shotgun
sequence; 664466568; NZ_JOHB01000013.1
4288; Streptomyces sp. NRRL WC-3773 contig2.1, whole genome shotgun
sequence; 664478668; NZ_JOJI01000002.1
4289; Streptomyces sp. NRRL WC-3773 contig11.1, whole genome shotgun
sequence; 664481891; NZ_JOJI01000011.1
4290; Streptomyces sp. NRRL WC-3773 contig36.1, whole genome shotgun
sequence; 664487325; NZ_JOJI01000036.1
4291; Streptomyces olivaceus strain NRRL B-3009 contig20.1, whole genome
shotgun sequence; 664523889; NZ_JOFH01000020.1
4292; Streptomyces sp. NRRL F-5702 contig3.1, whole genome shotgun
sequence; 664537198; NZ_JOHD01000003.1
4293; Streptomyces ochmceiscleroticus strain NRRL ISP-5594 contig9.1, whole
genome shotgun sequence; 664540649; NZ_JOAX01000009.1
4294; Streptomyces sp. NRRL S-118 P205_Doro1_scaffold2, whole genome
shotgun sequence; 664556736; NZ_KL591003.1
4295; Streptomyces sp. NRRL WC-3641 P206 Dorol_scaffold18, whole
genome shotgun sequence; 664607641; NZ_KL579016.1
4296; Streptomyces sp. NRRL S-623 contig14.1, whole genome shotgun
sequence; 665522165; NZ_JOJC01000016.1
4297; Streptomyces sp. NRRL WC-3719 contig152.1, whole genome shotgun
sequence; 665536304; NZ_JOCD01000152.1
4298; Streptomyces durhamensis strain NRRL B-3309 contig3.1, whole genome
shotgun sequence; 665586974; NZ_JNXR01000003.1
4299; Streptomyces durhamensis strain NRRL B-3309 contig23.1, whole genome
shotgun sequence; 665604093; NZ_JNXR01000023.1
4300; Bacillus sp. MB2021 T349DRAFT_scaffold00010.10_C, whole genome
shotgun sequence; 671553628; NZ_JN1101000011.1
4301; Lachnospira multipara LB2003 T537DRAFT_scaffold00010.10_C, whole
genome shotgun sequence; 671578517; NZ_JNKW01000011.1
4302; Closltidium drakei strain SL1 contig 20, whole genome shotgun sequence;
692121046; NZ_JIBUO2000020.1
4303; Rhodococcus fascians A2ld2 contig10, whole genome shotgun sequence;
739287390; NZ_JMFA01000010.1
4304; Streptomyces alboviridis strain NRRL B-1579 contig18.1, whole genome
shotgun sequence; 695845602; NZ_JNWU01000018.1
4305; Streptomyces sp. JS01 contig2, whole genome shotgun sequence;
695871554; NZ_JPWW01000002.1
4306; Streptomyces albus subsp. albus strain NRRL B-16041 contig28.1, whole
genome shotgun sequence; 695870063; NZ_JNWW01000028.1
4307; Streptomyces fimosus subsp. fimosus strain NRRL B-16073 contig7.1,
whole genome shotgun sequence; 696493030; NZ_JNWX01000007.1
4308; Streptomyces peucetius strain NRRL WC-3868 contig49.1, whole genome
shotgun sequence; 665671804; NZ_JOCK01000052.1
4309; Blautia producta strain ER3 contig 8, whole genome shotgun sequence;
696661199; NZ_JPJF01000008.1
4310; Streptomyces albus subsp. albus strain NRRL B-1811 contig32.1, whole
genome shotgun sequence; 665618015; NZ_JODR01000032.1
4311; Streptomyces lydicus strain NRRL ISP-5461 contig41.1, whole genome
shotgun sequence; 702808005; NZ_JNZA01000041.1
4312; Streptomyces iakyrus strain NRRL ISP-5482 contig6.1, whole genome
shotgun sequence; 702914619; NZ_JNXI01000006.1
4313; Kibdelosporangium afidum subsp. largum strain NRRL B-24462
contig91.4, whole genome shotgun sequence; 703243970; NZ_JNYM01001429.1
4314; Streptomyces galbus strain KCCM 41354 contig00021, whole genome
shotgun sequence; 716912366; NZ_JRHJ01000016.1
4315; Bacillus aryabhattai strain GZO3 contigl_scaffold 1, whole genome shotgun
sequence; 723602665; NZ_JPIE01000001.1
4316; Bacillus cereus R309803 chromosome, whole genome shotgun sequence;
238801472; NZ_CM000720.1
4317; Bacillus cereus AH603 chromosome, whole genome shotgun sequence;
238801489; NZ_CM000737.1
4318; Sphingomonas sp. 37zxx contig3_scaffold2, whole genome shotgun
sequence; 728813405; NZ_JR0H01000003.1
4319; Lachnospira multipara MC2003 T520DRAFT_scaffold00007.7_C, whole
genome shotgun sequence; 653225243; NZ_JHWY01000011.1
4320; Bacillus sp. 72 T409DRAFT_scf7180000000077_quiver.15S, whole
genome shotgun sequence; 736160933; NZ_JQMI01000015.1
4321; Bacillus simplex BA2H3 scaffold2, whole genome shotgun sequence;
736214556; NZ_KN360955.1
4322; Bacillus manliponensis strain JCM 15802 contig4, whole genome shotgun
sequence; 736629899; NZ_JOTN01000004.1
4323; Bacillus vietnamensis strain HD-02, whole genome shotgun sequence;
736762362; NZ_CCDN010000009.1
4324; Erythrobacter longus strain DSM 6997 contig9, whole genome shotgun
sequence; 736965849; NZ_JMIW01000009.1
4325; Calothfix sp. 336/3, complete genome; 821032128; NZ_CP011382.1
4326; Desulfobacter vibfioformis DSM 8776 Q366DRAFT_scaffold00036.35_C,
whole genome shotgun sequence; 737257311; NZ_JQKJ01000036.1
4327; Actinokineospora spheciospongiae strain EG49 contig1268_1, whole
genome shotgun sequence; 737301464; NZ_AYXG01000139.1
4328; Bacillus firmus DS1 scaffold33, whole genome shotgun sequence;
737350949; NZ_APVL01000034.1
4329; Bacillus hemicellulosilyticus JCM 9152, whole genome shotgun sequence;
737360192; NZ_BAUU01000008.1
4330; Edaphobacter aggregans DSM 19364 Q363DRAFT_scaffold00032.32_C,
whole genome shotgun sequence; 737370143; NZ_JQKI01000040.1
4331; Halobacillus sp. BBL2006 cont444, whole genome shotgun sequence;
737576092; NZ_JRNX01000441.1
4332; Bacillus akibai JCM 9157, whole genome shotgun sequence; 737696658;
NZ_BAUV01000025.1
4333; Frankia sp. CeD CEDDRAFT_scaffold_22.23, whole genome shotgun
sequence; 737947180; NZ_JPGU01000023.1
4334; Fusobacterium necrophorum BI, IR-2 contig0075, whole genome shotgun
sequence; 737951550; NZ_JAAG01000075.1
4335; [Leptolyngbya] sp. JSC-1 Osccy1DRAFT_CYJSC1 DRAF_scaffold00069.1,
whole genome shotgun sequence; 738050739; NZ_KL662191.1
4336; Lysobacter darjeonensis GH1-9 contig23, whole genome shotgun sequence;
738180952; NZ_AVPU01000014.1
4337; Mastigocoleus testarum BC008 Contig-2, whole genome shotgun sequence;
959926096; NZ_LMTZ01000085.1
4338; Myxosarcina sp. GI1 contig 5, whole genome shotgun sequence;
738529722; NZ_JRFE01000006.1
4339; Paenibacillus sp. FSL H7-689 Contig015, whole genome shotgun sequence;
738716739; NZ_ASPU01000015.1
4340; Paenibacillus sp. FSL R7-269 Contig022, whole genome shotgun sequence;
738803633; NZ_ASPS01000022.1
4341; Paenibacillus sp. FSL R7-277 Contig088, whole genome shotgun sequence;
738841140; NZ_ASPX01000088.1
4342; Prevotella oryzae DSM 17970 XylorDRAFT_X0A.1, whole genome
shotgun sequence; 738999090; NZ_KK073873.1
4343; Rothia dentocariosa strain C6B contig 5, whole genome shotgun sequence;
739372122; NZ_JQHE01000003.1
4344; Ruminococcus albus 8 contig00035, whole genome shotgun sequence;
325680876; NZ_ADKM02000123.1
4345; Amycolatopsis orientalis DSM 40040 = KCTC 9412 contig 32, whole
genome shotgun sequence; 499136900; NZ_ASJB01000015.1
4346; Streptococcus salivarius strain NU10 contig_11, whole genome shotgun
sequence; 739748927; NZ_BMT01000011.1
4347; Streptomyces griseorubens strain JSD-1 contig143, whole genome shotgun
sequence; 657284919; IIMG01000143.1
4348; Streptomyces avermitilis MA-4680 = NBRC 14893, complete genome;
162960844; NC_003155.4
4349; Streptomyces avermitilis MA-4680 = NBRC 14893, complete genome;
162960844; NC_003155.4
4350; Streptomyces aurantiacus JA 4570 Seq28, whole genome shotgun sequence;
514916412; NZ_AOPZ01000028.1
4351; Streptomyces griseus subsp. griseus strain NRRL WC-3645 contig39.1,
whole genome shotgun sequence; 739830131; NZ_JOJE01000039.1
4352; Streptomyces griseus subsp. griseus strain NRRL WC-3645 contig40.1,
whole genome shotgun sequence; 739830264; NZ_JOJE01000040.1
4353; Streptomyces scabiei strain NCPPB 4086 scf 65433_365.1, whole genome
shotgun sequence; 739854483; NZ_KL997447.1
4354; Streptomyces sp. FXJ7.023 Contig10, whole genome shotgun sequence;
510871397; NZ_APIV01000010.1
4355; Streptomyces sp. NRRL F-5053 contig1.1, whole genome shotgun
sequence; 664356765; NZ_JOHT01000001.1
4356; Streptomyces viridochromogenes Tue57 Seq127, whole genome shotgun
sequence; 443625867; NZ_AMLP01000127.1
4357; Streptomyces sp. Tu 6176 scaffold00003, whole genome shotgun sequence;
740044478; NZ_KK106990.1
4358; Streptomyces toyocaensis strain NRRL 15009 contig00064, whole genome
shotgun sequence; 740092143; NZ_JFCB01000064.1
4359; Streptomyces sp. PRh5 contig001, whole genome shotgun sequence;
740097110; NZ_JABQ01000001.1
4360; Tolypothrix bouteillei VB521301 scaffold 1, whole genome shotgun
sequence; 910242069; NZ_JHEG02000048.1
4361; Thioclava indica strain DT23-4 contig29, whole genome shotgun sequence;
740292158; NZ_AUNB01000028.1
4362; Streptomyces albulus strain NK660, complete genome; 754221033;
NZ_CP007574.1
4363; Paenibacillus sp. FSL H7-0357, complete genome; 749299172;
NZ_CP009241.1
4364; Paenibacillus stellifer strain DSM 14472, complete genome; 753871514;
NZ_CP009286.1
4365; Brevundimonas nasdar strain TPW30 Contig 13, whole genome shotgun
sequence; 746187665; NZ_MSY01000013.1
4366; Paenibacillus polymyxa strain DSM 365 Contig001, whole genome shotgun
sequence; 746220937; NZ_JMIQ01000001.1
4367; Paenibacillus sp. IHB B 3415 contig 069, whole genome shotgun sequence;
746258261; NZ_JUB01000069.1
4368; Streptomyces sp. 769, complete genome; 749181963; NZ_CP003987.1
4369; Hassallia byssoidea VB512170 scaffold 0, whole genome shotgun
sequence; 748181452; NZ_JTCM01000043.1
4370; Hassallia byssoidea VB512170 scaffold 0, whole genome shotgun
sequence; 748181452; NZ_JTCM01000043.1
4371; Jeotgalibacillus malaysiensis strain D5 chromosome, complete genome;
749182744; NZ_CP009416.1
4372; Paenibacillus sp. FSL R7-0273, complete genome; 749302091;
NZ_CP009283.1
4373; Paenibacillus jamilae strain NS115 contig 27, whole genome shotgun
sequence; 970428876; NZ_LDRX01000027.1
4374; Streptomonospora alba strain YIM 90003 contig 9, whole genome shotgun
sequence; 749673329; NZ_JR0001000009.1
4375; Actinobaculum sp. oral taxon 183 str. F0552 A_P1HMPREF0043-
1.0_Cont1.1, whole genome shotgun sequence; 541476958; AWSB01000006.1
4376; Actinobaculum sp. oral taxon 183 str. F0552 5caffold15, whole genome
shotgun sequence; 545327527; NZ_KE951412.1
4377; Actinobaculum sp. oral taxon 183 str. F0552 A_P1HMPREF0043-
1.0_Cont15.2, whole genome shotgun sequence; 541473965; AWSB01000041.1
4378; Nocardia transvalensis NBRC 15921, whole genome shotgun sequence;
485125031; NZ_BAGL01000055.1
4379; Xenococcus sp. PCC 7305 scaffold 00124, whole genome shotgun
sequence; 443325429; NZ_ALVZ01000124.1
4380; Mesorhizobium sp. ORS3324, whole genome shotgun sequence;
751265275; NZ_CCMY01000220.1
4381; Mesorhizobium plurifarium, whole genome shotgun sequence; 751292755;
NZ_CCNE01000004.1
4382; Mesorhizobium sp. SOD10, whole genome shotgun sequence; 751285871;
NZ_CCNA01000001.1
4383; Tolypothrix campylonemoides VB511288 scaffold 0, whole genome
shotgun sequence; 751565075; NZ_JXCB01000004.1
4384; Jeotgalibacillus campisalis strain SF-57 contig00001, whole genome
shotgun sequence; 751586078; NZ__ARR01000001.1
4385; Jeotgalibacillus soli strain P9 contig00009, whole genome shotgun
sequence; 751619763; NZ_JXRP01000009.1
4386; Cylindrospennum stagnale PCC 7417, complete genome; 434402184;
NC_019757.1
4387; Bacillus sp. 1NLA3E, complete genome; 488570484; NC_021171.1
4388; Tistrella mobilis KA081020-065, complete genome; 389875858;
NC_017956.1
4389; Stackebrandtia nassauensis DSM 44728, complete genome; 291297538;
NC_013947.1
4390; Magnetospirillum gryphiswaldense MSR-1, WORKING DRAFT
SEQUENCE, 373 unordered pieces; 144897097; CU459003.1
4391; Clostddium beijerinckii strain NCIMB 14988 genome; 754484184;
NZ_CP010086.1
4392; Frankia alni str. ACN14A chromosome, complete sequence; 111219505;
NC_008278.1
4393; Streptomyces sp. NBRC 110027, whole genome shotgun sequence;
754788309; NZ_BBN001000002.1
4394; Streptomyces sp. NBRC 110027, whole genome shotgun sequence;
754796661; NZ_BBN001000008.1
4395; Paenibacillus sp. FSL R7-0331, complete genome; 754821094;
NZ_CP009284.1
4396; Kibdelosporangium sp. MJ126-NF4, whole genome shotgun sequence;
754819815; NZ_CDME01000002.1
4397; Paenibacillus camerounensis strain G4, whole genome shotgun sequence;
754841195; NZ_CCDG010000069.1
4398; Paenibacillus borealis strain DSM 13188, complete genome; 754859657;
NZ_CP009285.1
4399, Streptacidiphilus neutrinimicus strain NBRC 100921, whole genome
shotgun sequence; 755016073; NZ_BBP001000030.1
4400, Streptacidiphilus melanogenes strain NBRC 103184, whole genome
shotgun sequence; 755032408; NZ_BBPP01000024.1
4401, Streptacidiphilus anmyonensis strain NBRC 103185, whole genome
shotgun sequence; 755077919; NZ_BBPQ01000048.1
4402, Streptacidiphilus jiangxiensis strain NBRC 100920, whole genome shotgun
sequence; 755108320; NZ_BBPN01000056.1
4403; Mesorhizobium sp. 0RS3359, whole genome shotgun sequence;
756828038; NZ_CCNC01000143.1
4404; Aneurinibacillus migulanus strain Nagano El contig 36, whole genome
shotgun sequence; 928874573; NZ_LIXL01000208.1
4405; Bifidobacterium reuteri DSM 23975 Contig04, whole genome shotgun
sequence; 672991374; JGZKO1000004.1
4406; Streptomyces luteus strain TRM 45540 Scaffoldl, whole genome shotgun
sequence; 759659849; NZ_KN039946.1
4407; Streptomyces nodosus strain ATCC 14899 genome; 759739811;
NZ_CP009313.1
4408; Streptomyces fradiae strain ATCC 19609 contig0008, whole genome
shotgun sequence; 759752221; NZ_JNAD01000008.1
4409; Streptomyces glaucescens strain GLA.0, complete genome; 759802587;
NZ_CP009438.1
4410; Nonomumea candida strain NRRL B-24552 contig8 1, whole genome
shotgun sequence; 759934284; NZ_JOAG01000009.1
4411; Nonomumea candida strain NRRL B-24552 contig28.1, whole genome
shotgun sequence; 759944490; NZ_JOAG01000030.1
4412; Nonomumea candida strain NRRL B-24552 contig42.1, whole genome
shotgun sequence; 759948103; NZ_JOAG01000045.1
4413; Streptomyces fulvissimus DSM 40593, complete genome; 488607535;
NC_021177.1
4414; Microcystis aeruginosa PCC 9807, whole genome shotgun sequence;
425454132; NZ_HE973326.1
4415; Streptomyces natalensis ATCC 27448 Scaffold 46, whole genome shotgun
sequence; 764442321; NZ_JRKI01000041.1
4416; Streptomyces iranensis genome assembly Siranensis, scaffold SCAF00002;
765016627; NZ_LK022849.1
4417; Risungbinella massiliensis strain GD1, whole genome shotgun sequence;
765315585; NZ_LN812103.1
4418; Paenibacillus tenae strain NRRL B-30644 contig00007, whole genome
shotgun sequence; 765319397; NZ_JTHP01000007.1
4419; Streptococcus suis strain L58I, whole genome shotgun sequence;
766595491; NZ_CEHM01000004.1
4420; Bacillus mycoides strain 11kri323 LG56_082, whole genome shotgun
sequence; 765533368; NZ_JYCJ01000082.1
4421; Paenibacillus polymyxa strain NRRL B-30509 contig00003, whole genome
shotgun sequence; 766607514; NZ_JTH001000003.1
4422; Frankia sp. CpIl-P FF86_1013, whole genome shotgun sequence;
946950294; NZ_LEX01000013.1
4423; Streptococcus suis strain B28P, whole genome shotgun sequence;
769231516; NZ_CDTB01000010.1
4424; Lachnospiraceae bacterium NK4A144 G619DRAFT_scaffold00002.2_C,
whole genome shotgun sequence; 652826657; NZ_AUJT01000002.1
4425; Lechevalieria aerocolonigenes strain NRRL B-16140 contig11.3, whole
genome shotgun sequence; 772744565; NZ_JYJG01000059.1
4426; Streptomyces sp. NRRL F-4428 contig40.2, whole genome shotgun
sequence; 772774737; NZ_JYJI01000131.1
4427; Streptomyces sp. FxanaA7 F611DRAFT_scaffold00041.41_C, whole
genome shotgun sequence; 780340655; NZ_LACL01000054.1
4428; Streptomyces rubellomurinus strain ATCC 31215 contig-63, whole genome
shotgun sequence; 783211546; NZ_JZKH01000064.1
4429; Streptomyces rubellomurinus subsp. indigoferus strain ATCC 31304 contig-
55, whole genome shotgun sequence; 783374270; NZ_JZKG01000056.1
4430; Elstera litoralis strain Dia-1 c21, whole genome shotgun sequence;
788026242; NZ_LAJY01000021.1
4431; Streptomyces sp. NRRL B-1568 contig-76, whole genome shotgun
sequence; 799161588; NZ_JZWZ01000076.1
4432; Sphingomonas sp. SRS2 contig40, whole genome shotgun sequence;
806905234; NZ_LARW01000040.1
4433; Paenibacillus wulumuqiensis strain Y24 Scaffold4, whole genome shotgun
sequence; 808051893; NZ_KQ040793.1
4434; Paenibacillus daici strain H9 Scaffold3, whole genome shotgun sequence;
808064534; NZ_KQ040798.1
4435; Spirosoma radiotolerans strain DG5A, complete genome; 817524426;
NZ_CP010429.1
4436; Allosalinactinospora lopnorensis strain CA15-2 contig00044, whole genome
shotgun sequence; 815863894; NZ_LAJC01000044.1
4437; Allosalinactinospora lopnorensis strain CA15-2 contig00053, whole genome
shotgun sequence; 815864238; NZ_LAJC01000053.1
4438; Bacillus sp. SA1-12 scf7180000003378, whole genome shotgun sequence;
817541164; NZ_LATZ01000026.1
4439; Altererythrobacter atlanticus strain 26DY36, complete genome; 927872504;
NZ_CP011452.2
4440; Streptomyces lydicus A02, complete genome; 822214995; NZ_CP007699.1
4441; Streptomyces lydicus A02, complete genome; 822214995; NZ_CP007699.1
4442; Bacillus cereus strain B4147 NODES, whole genome shotgun sequence;
822530609; NZ_LCYN01000004.1
4443; Erythrobacter luteus strain KA37 contig 1, whole genome shotgun sequence;
822631216; NZ_LBHB01000001.1
4444; Erythrobacter marinus strain HWDM-33 contig3, whole genome shotgun
sequence; 823659049; NZ_LBHU01000003.1
4445; Streptomyces sp. KE1 Contig 11, whole genome shotgun sequence;
825353621; NZ_LAYX01000011.1
4446; Sphingomonas sp. Y57 scaffold74, whole genome shotgun sequence;
826051019; NZ_LDES01000074.1
4447; Alistipes sp. ZOR0009 L990_140, whole genome shotgun sequence;
835319962; NZ_JTLD01000119.1
4448; Bacillus aryabhattai strain T61 Scaffold', whole genome shotgun sequence;
836596561; NZ_KQ087173.1
4449; Paenibacillus sp. TCA20, whole genome shotgun sequence; 843088522;
NZ_BBIW01000001.1
4450; Bacillus circulans strain RIT379 contig11, whole genome shotgun sequence;
844809159; NZ_LDPH01000011.1
4451; Bacillus circulans strain RIT379 contig11, whole genome shotgun sequence;
844809159; NZ_LDPH01000011.1
4452; Omithinibacillus califomiensis strain DSM 16628 contig 22, whole genome
shotgun sequence; 849059098; NZ_LDUE01000022.1
4453; Bacillus pseudalcaliphilus strain DSM 8725 superll, whole genome
shotgun sequence; 849078078; NZ_LFJ001000006.1
4454; Bacillus aryabhattai strain LK25 16, whole genome shotgun sequence;
850356871; NZ_LDWN01000016.1
4455; Methanobacterium formicicum genome assembly D5M1535,
chromosome: chrI; 851114167; NZ_LN515531.1
4456; Methanobacterium arcticum strain M2 EI99DRAFT_scaffold00005.5_C,
whole genome shotgun sequence; 851140085; NZ_JQKN01000008.1
4457; Methanobacterium sp. SMA-27 DL91DRAFT unitig_0_quiver. l_C, whole
genome shotgun sequence; 851351157; NZ_JQLY01000001.1
4458; Cellulomonas sp. A375-1 contig 129, whole genome shotgun sequence;
856992287; NZ_LFKW01000127.1
4459; Streptomyces sp. HNS054 contig28, whole genome shotgun sequence;
860547590; NZ_LDZX01000028.1
4460; Bacillus cereus strain RIMV BC 126 212, whole genome shotgun sequence;
872696015; NZ_LAB001000035.1
4461; Streptomyces leeuwenhoekii strain C58 contig126, whole genome shotgun
sequence; 873282818; NZ_LFEH01000123.1
4462; Bacillus sp. 220_BSPC 1447_75439_1072255, whole genome shotgun
sequence; 880954155; NZ_JVPL01000109.1
4463; Bacillus sp. 522_BSPC 2470_72498_1083579_594_ . . . _522_, whole
genome shotgun sequence; 880997761; NZ_JVDT01000118.1
4464; Bacillus sp. 522_BSPC 2470_72498_1083579_594_ . . . _522_, whole
genome shotgun sequence; 880997761; NZ_JVDT01000118.1
4465; Streptomyces varsoviensis strain NRRL B-3589 contig2.1, whole genome
shotgun sequence; 664348063; NZ_JOFN01000002.1
4466; Scytonema tolypothrichoides VB-61278 scaffold 6, whole genome shotgun
sequence; 890002594; NZ_JXCA01000005.1
4467; Erythrobacter atlanticus strain s21-N3, complete genome; 890444402;
NZ_CP011310.1
4468; Streptococcus pseudopneumoniae strain 445 SPSE
347_91401_2272315_318_ . . . _319_, whole genome shotgun sequence;
896667361; NZ_JVGV01000030.1
4469; Kitasatospora sp. MY 5-36 Contig_703_, whole genome shotgun sequence;
902792184; NZ_LFVW01000692.1
4470; Streptomyces caatingaensis strain CMAA 1322 contig02, whole genome
shotgun sequence; 906344334; NZ_LFXA01000002.1
4471; Streptomyces caatingaensis strain CMAA 1322 contig07, whole genome
shotgun sequence; 906344339; NZ_LFXA01000007.1
4472; Streptomyces caatingaensis strain CMAA 1322 contig09, whole genome
shotgun sequence; 906344341; NZ_LFXA01000009.1
4473; Candidatus Halobonum tyrrellensis G22 contig00002, whole genome
shotgun sequence; 557371823; NZ_ASGZ01000002.1
4474; Bacillus weihenstephanensis strain JAS 83/3 Bw_JAS-83/3_contig00005,
whole genome shotgun sequence; 910095435; NZ_JNLY01000005.1
4475; Silvibacterium bohemicum strain S15 contig 3, whole genome shotgun
sequence; 910257956; NZ_LBHJ01000003.1
4476; Silvibacterium bohemicum strain S15 contig 3, whole genome shotgun
sequence; 910257956; NZ_LBHJ01000003.1
4477; Silvibacterium bohemicum strain S15 contig 30, whole genome shotgun
sequence; 910257973; NZ_LBHJ01000020.1
4478; Xanthomonas campestris pv. viticola strain LMG 965, whole genome
shotgun sequence; 704493846; NZ_CBZT010000006.1
4479; Streptomyces baamensis strain NRRL B-2842 P144_Dorol_scaffold6,
whole genome shotgun sequence; 662129456; NZ_KL573544.1
4480; Streptomyces albus subsp. albus strain NRRL B-2445 contig1.1, whole
genome shotgun sequence; 664084661; NZ_JOED01000001.1
4481; Bacillus flexus strain Riq5 contig 32, whole genome shotgun sequence;
914730676; NZ_LFQJ01000032.1
4482; Salinibacter ruber M8 chromosome, complete genome; 294505815;
NC_014032.1
4483; Streptomyces vitaminophilus DSM 41686 A3IGDRAFT_scaffold_10.11,
whole genome shotgun sequence; 483682977; NZ_KB904636.1
4484; Halomonas anticariensis FP35 = DSM 16096 strain FP35 Scaffoldl, whole
genome shotgun sequence; 514429123; NZ_KE332377.1
4485; Cohnella thermotolerans DSM 17683 G485DRAFT_scaffold00003.3,
whole genome shotgun sequence; 652794305; NZ_KE386956.1
4486; Streptomyces sp. GXT6 genomic scaffold Scaffold4, whole genome
shotgun sequence; 654975403; NZ_K1601366.1
4487; Verrucomicrobia bacterium LP2A G346DRAFT_scf7180000000012_quiver.2_C,
whole genome shotgun sequence; 640169055; NZ_JAFS01000002.1
4488; Actinomadura oligospora ATCC 43269 P696DRAFT_scaffold00008.8_C,
whole genome shotgun sequence; 651281457; NZ_JADG01000010.1
4489; Actinomadura oligospora ATCC 43269 P696DRAFT_scaffold00008.8_C,
whole genome shotgun sequence; 651281457; NZ_JADG01000010.1
4490; Rubellimicrobium mesophilum DSM 19309 scaffold23, whole genome
shotgun sequence; 739419616; NZ_KK088564.1
4491; Pseudonocardia acaciae DSM 45401 N912DRAFT_scaffold00002.2_C,
whole genome shotgun sequence; 655569633; NZ_JIA101000002.1
4492; Terasakiellapusilla DSM 6293 Q397DRAFT scaffold00039.39_C, whole
genome shotgun sequence; 655499373; NZ_JHY001000039.1
4493; Bacillus sp. MB2021 T349DRAFT_scaffold00010.10_C, whole genome
shotgun sequence; 671553628; NZ_JN1101000011.1
4494; Streptomyces olindensis strain DAUFPE 5622 103, whole genome shotgun
sequence; 739918964; NZ_JJOH01000097.1
4495; Thioclava dalianensis strain DLFJ1-1 contig2, whole genome shotgun
sequence; 740220529; NZ_JHEH01000002.1
4496; Streptomyces megasporus strain NRRL B-16372 contig19.1, whole genome
shotgun sequence; 671525382; NZ_JODL01000019.1
4497; Streptomyces achromogenes subsp. achromogenes strain NRRL B-2120
contig2.1, whole genome shotgun sequence; 664063830; NZ_JODT01000002.1
4498; Microbispora rosea subsp. nonnitritogenes strain NRRL B-2631 contig12.1,
whole genome shotgun sequence; 663732121; NZ_JNZQ01000012.1
4499; Streptomyces sp. NRRL S-920 contig36.1, whole genome shotgun
sequence; 664256887; NZ_JODF01000036.1
4500; Streptomyces flavochromogenes strain NRRL B-2684 contig8.1, whole
genome shotgun sequence; 663317502; NZ_JNZ001000008.1
4501; Streptomyces natalensis strain NRRL B-5314 P055_Dorol_scaffold13,
whole genome shotgun sequence; 662108422; NZ_KL570019.1
4502; Bacillus sp. UNC322MFChir4.1 BR72DRAFT_scaffold00004.4, whole
genome shotgun sequence; 737456981; NZ_KNO50811.1
4503; Paenibacillus wynnii strain DSM 18334 unitig 2, whole genome shotgun
sequence; 738760618; NZ_JQCR01000002.1
4504; Amycolatopsis sp. MJ11V12582 contig00007, whole genome shotgun
sequence; 739487309; NZ_JPLW01000007.1
4505; Sphingopyxis fiibergensis strain Kp5.2, complete genome; 749188513;
NZ_CP009122.1
4506; Brevundimonas nasdar strain TPW30 Contig 11, whole genome shotgun
sequence; 746187486; NZ_JWSY01000011.1
4507; Microcystis panniformis FACHB-1757, complete genome; 917764592;
NZ_CP011339.1
4508; Desulfocapsa sulfexigens DSM 10523, complete genome; 451945650;
NC_020304.1
4509; Gorillibacterium massiliense strain G5, whole genome shotgun sequence;
750677319; NZ_CBQR020000171.1
4510; Salinarimonas rosea DSM 21201 G407DRAFT_scaffold00021.21_C,
whole genome shotgun sequence; 655990125; NZ_AUBC01000024.1
4511; Streptomyces sp. NRRL S-118 P205_Doro1_scaffold34, whole genome
shotgun sequence; 664565137; NZ_KL591029.1
4512; Streptomyces glaucescens strain GLA.0, complete genome; 759802587;
NZ_CP009438.1
4513; Paenibacillus sp. FSL R5-0912, complete genome; 754884871;
NZ_CP009282.1
4514; Paenibacillus sp. FSL P4-0081, complete genome; 754777894;
NZ_CP009280.1
4515; Bacillus subtilis subsp. spizizenii RFWG1A4 contig00010, whole genome
shotgun sequence; 764657375; NZ_AJHM01000010.1
4516; Paenibacillus algorifonticola strain XJ259 5caffold20_1, whole genome
shotgun sequence; 808072221; NZ_LAQ001000025.1
4517; Mycobacterium sp. UM_Kg27 contig000002, whole genome shotgun
sequence; 809025315; NZ_JRMM01000002.1
4518; Mycobacterium sp. UM_Kg 1 contig000164, whole genome shotgun
sequence; 809073490; NZ_JRMK01000164.1
4519; Streptomyces avicenniae strain NRRL B-24776 contig3.1, whole genome
shotgun sequence; 919531973; NZ_JOEK01000003.1
4520; Paenibacillus peoriae strain HS311, complete genome; 922052336;
NZ_CP011512.1
4521; Paenibacillus sp. FJAT-27812 scaffold 0, whole genome shotgun sequence;
922780240; NZ_LIGH01000001.1
4522; Hapalosiphon sp. MRB220 contig 91, whole genome shotgun sequence;
923076229; NZ_LIRN01000111.1
4523; Bacillus sp. FJAT-21352 Scaffold 1, whole genome shotgun sequence;
924654439; NZ_LIUS01000003.1
4524; Bacillus gobiensis strain FJAT-4402 chromosome; 926268043;
NZ_CP012600.1
4525; Streptomyces sp. NRRL B-1140 P439contig15.1, whole genome shotgun
sequence; 926344107; NZ_LGEA01000058.1
4526; Streptomyces sp. NRRL B-1140 P439contig32.1, whole genome shotgun
sequence; 926344331; NZ_LGEA01000105.1
4527; Streptomyces sp. NRRL F-5755 P309contig48.1, whole genome shotgun
sequence; 926371517; NZ_LGCW01000271.1
4528; Streptomyces sp. NRRL F-5755 P309contig50.1, whole genome shotgun
sequence; 926371520; NZ_LGCW01000274.1
4529; Saccharothrix sp. NRRL B-16348 P442contig71.1, whole genome shotgun
sequence; 926395199; NZ_LGED01000246.1
4530; Streptomyces sp. WM6378 P402contig63.1, whole genome shotgun
sequence; 926403453; NZ_LGDD01000321.1
4531; Streptomyces sp. WM6378 P402contig63.1, whole genome shotgun
sequence; 926403453; NZ_LGDD01000321.1
4532; Nocardia sp. NRRL S-836 P437contig3.1b, whole genome shotgun
sequence; 926412094; NZ_LGDY01000103.1
4533; Nocardia sp. NRRL S-836 P437contig39.1, whole genome shotgun
sequence; 926412104; NZ_LGDY01000113.1
4534; Paenibacillus sp. A59 contig 353, whole genome shotgun sequence;
927084730; NZ_LITU01000050.1
4535; Paenibacillus sp. A59 contig_416, whole genome shotgun sequence;
927084736; NZ_LITU01000056.1
4536; Streptomyces sp. NRRL S-444 contig322.4, whole genome shotgun
sequence; 797049078; JZWX01001028.1
4537; Streptomyces chattanoogensis strain NRRL ISP-5002 ISP5002contig8.1,
whole genome shotgun sequence; 928897585; NZ_LGKG01000196.1
4538; Streptomyces chattanoogensis strain NRRL ISP-5002 ISP5002contig9.1,
whole genome shotgun sequence; 928897596; NZ_LGKG01000207.1
4539; Bacillus sp. FJAT-28004 scaffold 2, whole genome shotgun sequence;
929005248; NZ_LGHP01000003.1
4540; Actinobacteria bacterium OK074 ctg60, whole genome shotgun sequence;
930473294; NZ_LJCV01000275.1
4541; Actinobacteria bacterium OK006 ctg112, whole genome shotgun sequence;
930490730; NZ_UCU01000014.1
4542; Actinobacteria bacterium OK006 ctg96, whole genome shotgun sequence;
930491003; NZ_LJCU01000287.1
4543; Kibdelosporangium phytohabitans strain KLBMP1111, complete genome;
931609467; NZ_CP012752.1
4544; Paenibacillus sp. GD6, whole genome shotgun sequence; 939708098;
NZ_LN831198.1
4545; Paenibacillus sp. GD6, whole genome shotgun sequence; 939708105;
NZ_LN831205 .1
4546; Alicyclobacillus ferrooxydans strain TC-34 contig 22, whole genome
shotgun sequence; 940346731; NZ_LJC001000107.1
4547; Streptomyces pactum strain ACT12 scaffold', whole genome shotgun
sequence; 943388237; NZ_LIQD01000001.1
4548; Streptomyces flocculus strain NRRL B-2465 B2465_contig_205, whole
genome shotgun sequence; 943674269; NZ_LIQ001000205.1
4549; Streptomyces aurantiacus strain NRRL ISP-5412 ISP-5412_contig_138,
whole genome shotgun sequence; 943881150; NZ_LIPP01000138.1
4550; Streptomyces graminilatus strain NRRL B-59124 B59124_contig_7, whole
genome shotgun sequence; 943897669; NZ_LIQQ01000007.1
4551; Streptomyces alboniger strain NRRL B-1832 B-1832_contig_37, whole
genome shotgun sequence; 943898694; NZ_LIQN01000037.1
4552; Streptomyces alboniger strain NRRL B-1832 B-1832_contig_384, whole
genome shotgun sequence; 943899498; NZ_LIQN01000384.1
4553; Streptomyces kanamyceticus strain NRRL B-2535 B-2535_contig_122,
whole genome shotgun sequence; 943922224; NZ_LIQU01000122.1
4554; Streptomyces kanamyceticus strain NRRL B-2535 B-2535_contig_247,
whole genome shotgun sequence; 943922567; NZ_LIQU01000247.1
4555; Streptomyces luridiscabiei strain NRRL B-24455 B24455 contig_315,
whole genome shotgun sequence; 943927948; NZ_LIQV01000315.1
4556; Streptomyces atriruber strain NRRL B-24165 contig 124, whole genome
shotgun sequence; 943949281; NZ_LIPN01000124.1
4557; Streptomyces hirsutus strain NRRL B-2713 B2713_contig_57, whole
genome shotgun sequence; 944005810; NZ_LIQT01000057.1
4558; Streptomyces aureus strain NRRL B-2808 contig 171, whole genome
shotgun sequence; 944012845; NZ_LIPQ01000171.1
4559; Streptomyces prasinus strain NRRL B-12521 B1252 l_contig_230, whole
genome shotgun sequence; 944020089; NZ_LIPRO1000230.1
4560; Streptomyces phaeochromogenes strain NRRL B-1248 B-
1248_contig_126, whole genome shotgun sequence; 944029528;
NZ_LIQZ01000126.1
4561; Streptomyces prasinus strain NRRL B-2712 B2712_contig_323, whole
genome shotgun sequence; 944410649; NZ_LIRH01000323.1
4562; Streptomyces prasinopilosus strain NRRL B-2711 B2711_contig_370,
whole genome shotgun sequence; 944415035; NZ_LIRG01000370.1
4563; Streptomyces torulosus strain NRRL B-3889 B-3889_contig_18, whole
genome shotgun sequence; 944495433; NZ_LIRK01000018.1
4564; Frankia alni str. ACN14A chromosome, complete sequence; 111219505;
NC_008278.1
4565; Paenibacillus sp. Leaf72 contig 6, whole genome shotgun sequence;
947378267; NZ_LMLV01000032.1
4566; Sanguibacter sp. Leaf3 contig 2, whole genome shotgun sequence;
947472882; NZ_LMRH01000002.1
4567; Aeromicrobium sp. Root344 contig 1, whole genome shotgun sequence;
947552260; NZ_LMDH01000001.1
4568; Sphingopyxis sp. Root1497 contig 3, whole genome shotgun sequence;
947689975; NZ_LMGF01000003.1
4569; Sphingopyxis sp. Root1497 contig 3, whole genome shotgun sequence;
947689975; NZ_LMGF01000003.1
4570; Sphingomonas sp. Root1294 contig 7, whole genome shotgun sequence;
947890193; NZ_LMEJ01000014.1
4571; Sphingomonas sp. Root720 contig 7, whole genome shotgun sequence;
947704642; NZ_LMID01000015.1
4572; Sphingomonas sp. Root720 contig 8, whole genome shotgun sequence;
947704650; NZ_LMID01000016.1
4573; Sphingomonas sp. Root710 contig_l, whole genome shotgun sequence;
947721816; NZ_LMIB01000001.1
4574; Mesorhizobium sp. Root172 contig_2, whole genome shotgun sequence;
947919015; NZ_LMHP01000012.1
4575; Mesorhizobium sp. Root102 contig 3, whole genome shotgun sequence;
947937119; NZ_LMCP01000023.1
4576; Paenibacillus sp. Soi1750 contig_l, whole genome shotgun sequence;
947966412; NZ_LMSD01000001.1
4577; Paenibacillus sp. Soi1750 contig 1, whole genome shotgun sequence;
947966412; NZ_LMSD01000001.1
4578; Paenibacillus sp. Soi1522 contig 3, whole genome shotgun sequence;
947983982; NZ_LMRV01000044.1
4579; Paenibacillus sp. Root52 contig 3, whole genome shotgun sequence;
948045460; NZ_LMF001000023.1
4580; Bacillus sp. Soi1768D1 contig 5, whole genome shotgun sequence;
950170460; NZ_LMTA01000046.1
4581; Paenibacillus sp. Soi1724D2 contig 11, whole genome shotgun sequence;
946400391; LMRY01000003.1
4582; Paenibacillus sp. Root444D2 contig 4, whole genome shotgun sequence;
950271971; NZ_LME001000034.1
4583; Paenibacillus sp. Soi1766 contig 32, whole genome shotgun sequence;
950280827; NZ_LMSJ01000026.1
4584; Paenibacillus sp. Soi1766 contig 32, whole genome shotgun sequence;
950280827; NZ_LMSJ01000026.1
4585; Streptomyces sp. Root1310 contig 5, whole genome shotgun sequence;
951121600; NZ_LMEQ01000031.1
4586; Bacillus mumlis strain DSM 16288 5caffold4, whole genome shotgun
sequence; 951610263; NZ_LMBV01000004.1
4587; Streptomyces sp. MBT76 scaffold 4, whole genome shotgun sequence;
953813790; NZ_LNBE01000004.1
4588; Gorillibacterium sp. 5N4, whole genome shotgun sequence; 960412751;
NZ_LN881722.1
4589; Thalassobius activus strain CECT 5114, whole genome shotgun sequence;
960424655; NZ_CYUE01000025.1
4590; Microbacterium testaceum strain N5283 contig 37, whole genome shotgun
sequence; 969836538; NZ_LDRU01000037.1
4591; Microbacterium testaceum strain NS206 contig 27, whole genome shotgun
sequence; 969912012; NZ_LDRS01000027.1
4592; Microbacterium testaceum strain NS183 contig 65, whole genome shotgun
sequence; 969919061; NZ_LDRR01000065.1
4593; Sphingopyxis sp. H050 H050_contig000006, whole genome shotgun
sequence; 970555001; NZ_LNRZ01000006.1

What is claimed is:

1. A method for production and optional screening of one or more lasso peptides (LPs) or one or more lasso peptide analogs or their combination using a cell-free biosynthesis (CFB) reaction mixture, comprising the steps:
(i) combining and contacting one or more lasso precursor peptides (LPP), one or more lasso core peptide (LCP), or their combination, with a lasso cyclase (LCase) enzyme, and optionally with a lasso peptidase (LPase) enzyme when the one or more LPP is present, in a CFB reaction mixture,
(ii) synthesizing the one or more lasso peptides or LP analogs in the CFB reaction mixture, and
(iii) optionally screening the one or more lasso peptides or LP analogs for one or more desired properties or activities by (1) screening the CFB reaction mixture, or (2) screening the partially purified or substantially purified lasso peptide or LP analog.

2. The method according to claim 1, further comprising:
(i) obtaining at least one of the LPP, the LCP, the LPase or the LCase by chemical synthesis or by biological synthesis, optionally
(ii) where the biological synthesis comprises transcription and/or translation of a gene or oligonucleotide encoding the LCP, a gene or oligonucleotide encoding the LPP, a gene or oligonucleotide encoding the LPAse, or a gene or oligonucleotide encoding the LCase, and
optionally
(iii) where the transcription and/or translation of these genes or oligonucleotides occurs in the CFB reaction mixture.

3. The method according to claim 2, further comprising:
(i) designing the LP gene or oligonucleotide, the LPP gene or oligonucleotide, the LPase gene or oligonucleotide, or the LCase gene or oligonucleotide for transcription and/or translation in the CFB reaction mixture, and optionally
(ii) where the designing uses genetic sequences for the lasso precursor peptide gene, the lasso core peptide gene, the lasso peptidase gene, and/or the lasso cyclase gene, and optionally
(iii) where the genetic sequences are identified using a genome-mining algorithm, and optionally where the genome-mining algorithm is anti-SMASH, BAGEL3, or RODEO.

4. The method according to any of the preceding claims wherein the combining and contacting comprises a minimal set of lasso peptide biosynthesis components in the CFB reaction mixture, where the minimal set of lasso peptide biosynthesis components comprises the one or more lasso precursor peptides (A), one lasso peptidase (B), and one lasso cyclase (C), each of which may be independently generated by the biological and/or chemical synthesis methods, or the minimal set optionally further comprises the one or more lasso core peptide and one lasso cyclase, each of which may be independently generated by the biological and/or the chemical synthesis methods.

5. The method according to anyone of the preceding claims wherein the CFB reaction mixture contains a minimal set of lasso peptide biosynthesis components and comprises one or more of:
(i) a substantially isolated lasso precursor peptide or lasso precursor peptide fusion, a substantially isolated lasso cyclase enzyme or fusion thereof, and a substantially isolated lasso peptidase enzyme or fusion thereof, or
(ii) oligonucleotides (linear or circular constructs of DNA or RNA) that encode for a lasso precursor peptide or a fusion thereof, a substantially isolated lasso cyclase enzyme or fusion thereof, and a substantially isolated lasso peptidase enzyme or fusion thereof, or
(iii) a substantially isolated precursor peptide or fusion thereof, an oligonucleotide that encodes for a lasso cyclase or fusion thereof, and an oligonucleotide that encodes for a lasso peptidase or fusion thereof, or
(iv) an oligonucleotide that encodes for a precursor peptide, an oligonucleotide that encodes for a lasso cyclase or fusion thereof, and an oligonucleotide that encodes for a lasso peptidase, or fusion thereof, or
(v) a substantially isolated lasso core peptide or fusion thereof and a substantially isolated lasso cyclase or fusion thereof, or
(vi) an oligonucleotide that encodes for a lasso core peptide and a substantially isolated lasso cyclase or fusion thereof, or
(vii) an oligonucleotide that encodes for a lasso core peptide and an oligonucleotide that encodes for a lasso cyclase or fusion thereof.

6. The method according to any one of the preceding claims wherein the lasso precursor (A) is a peptide or polypeptide produced chemically or biologically, with a sequence corresponding to the even number of SEQ ID Nos: 1-2630 or a sequence with sequence identity greater than 30% of the even number of SEQ ID Nos: 1-2630, or a protein or peptide fusion or portion thereof.

7. The method according to any one of the preceding claims wherein the lasso peptidase (B) is an enzyme produced chemically or biologically, with a sequence corresponding to peptide Nos: 1316-2336 or a natural sequence with sequence identity greater than 30% of peptide Nos: 1316-2336.

8. The method according to any one of the preceding claims wherein the lasso cyclase (C) is an enzyme produced chemically or biologically with a sequence corresponding to peptide Nos: 2337-3761 or a natural sequence with sequence identity greater than 30% of peptide Nos: 2337-3761.

9. A method according to any one of the preceding claims wherein the CFB reaction mixture further comprises one or more RiPP recognition elements (RREs) or the genes encoding such RREs.

10. The method according to any one of the preceding claims wherein the RiPP recognition elements (RREs) are proteins produced chemically or biologically with a sequence corresponding to peptide Nos: 3762-4593 or a natural sequence with sequence identity greater than 30% of peptide Nos: 3762-4593, or a protein or peptide fusion or portion thereof.

11. A method according to any one of the preceding claims wherein the CFB reaction mixture contains a lasso peptidase or a lasso cyclase that is fused at the N- or C-terminus with one or more RiPP recognition elements (RREs).

12. The method according to any one of the preceding claims wherein the one or more lasso peptide or the one or more lasso peptide analog or their combination is produced.

13. The method according to any one of the preceding claims wherein the one or more lasso peptides or the one or more lasso peptide analogs or their combination is produced and screened.

14. The method according to any one of the preceding claims wherein the one or more lasso core peptide or lasso peptide or lasso peptide analogs, containing no fusion partners, comprises at least eleven amino acid residues and a maximum of about fifty amino acid residues.

15. The method according to any one of the preceding claims wherein the CFB reaction mixture (or system) comprises a whole cell extract, a cytoplasmic extract, a nuclear extract, or any combination thereof, wherein each are independently derived from a prokaryotic or a eukaryotic cell.

16. The method according to anyone of the preceding claims wherein the CFB reaction mixture comprises substantially isolated individual transcription and/or translation components derived from a prokaryotic or a eukaryotic cell.

17. The method according to any one of the preceding claims wherein the CFB reaction mixture further comprises one or more lasso peptide modifying enzymes or genes that encode the lasso peptide modifying enzymes, and optionally wherein the one or more lasso peptide modifying enzymes is independently selected from the group consisting of N-methyltransferases, O-methyltransferases, biotin ligases, glycosyltransferases, esterases, acylases, acyltransferases, aminotransferases, amidases, hydroxylases, dehydrogenases, halogenases, kinases, RiPP heterocyclases, RiPP cyclodehydratases, and prenyltransferases.

18. The method according to any one of the preceding claims wherein the CFB reaction mixture comprises a buffered solution comprising salts, trace metals, ATP and co-factors required for activity of one or more of the LPase, the LCase, an enzyme required for the translation, an enzyme required for the transcription, or a lasso peptide modifying enzyme.

19. The method according to any one of the preceding claims wherein the CFB reaction mixture comprises the substantially isolated lasso precursor peptides or lasso core peptide, or fusions thereof, combined and contacted with the substantially isolated enzymes that include a lasso cyclase, and optionally a lasso peptidase, or fusions thereof, in a buffered solution containing salts, trace metals, ATP, and co-factors required for enzymatic activity

20. The method according to any one of the preceding claims wherein the CFB system is used to facilitate the discovery of new lasso peptides from Nature, further comprising the steps:
(i) analyzing bacterial genome sequence data and predict the sequence of lasso peptide gene clusters and associated genes, optionally using the genome-mining algorithm, optionally where the genome-mining algorithm is anti-SMASH, BAGEL3, or RODEO,
(ii) cloning or synthesizing the minimal set of lasso peptide biosynthesis genes (A-C) or oligonucleotides containing these gene sequences, and
(iii) synthesizing known or previously undiscovered natural lasso peptides using the cell-free biosynthesis methods described herein.

21. A method according to any one of the preceding claims wherein the one or more lasso peptides, the one or more lasso peptide analogs, or their combination comprises a library containing at least one lasso peptide analog in which at least one amino acid residue is changed from its natural residue.

22. A method according to any one of the preceding claims wherein the one or more lasso peptides, the one or more lasso peptide analogs, or their combination comprises a library wherein substantially all or all amino acid mutational variants of the lasso core peptide or the lasso precursor peptide, optionally where the amino acid mutational variants of the lasso core peptide or the lasso precursor peptide are obtained by biological or chemical synthesis, and optionally where the biological synthesis uses a gene library encoding substantially all or all genetic mutational variants of the lasso core peptide or the lasso precursor peptide, optionally where the gene library is rationally designed, and optionally where the mutational variants of the lasso core peptide or the lasso precursor peptide are converted to lasso peptide mutational variants, and optionally where the lasso peptide mutational variants are screened for desired properties or activities.

23. A method according to claims 21 and 22 wherein a library of lasso peptides or lasso peptide analogs is created by (1) directed evolution technologies, or (2) chemical synthesis of lasso precursor peptide or lasso core peptide variants and enzymatic conversion to lasso peptide mutational variants, or (3) display technologies, optionally wherein the display technologies are in vitro display technologies, and optionally wherein in vitro display technologies are RNA or DNA display technologies, or combination thereof, and optionally where the library of lasso peptides or lasso peptide analogs is screened for desired properties or activities.

24. A lasso peptide library, a LP analog library or a combination thereof, comprising at least two lasso peptides, at least two lasso peptide analogs, or at least one lasso peptide and one lasso peptide analog, which may be pooled together in one vessel or where each member is separated into individual vessels (e.g., wells of a plate), and wherein the library member are isolated and purified, or partially isolated and purified, or substantially isolated and purified, or optionally wherein the library members are contained in a CFB reaction mixture.

25. A library of claim 24 wherein the library is created using the methods of claims 1-5.

26. A CFB reaction mixture useful for the synthesis of lasso peptides and lasso peptide analogs comprising one or more cell extracts or cell-free reaction media that support and facilitate a biosynthetic process wherein one or more lasso peptides or lasso peptide analogs is formed by converting one or more lasso precursor peptides or one or more lasso core peptides through the action of a lasso cyclase, and optionally a lasso peptidase, and optionally wherein transcription and/or translation of oligonucleotide inputs occurs to produce the lasso cyclase, lasso peptidase, lasso precursor peptides, and/or lasso core peptides.

27. A CFB reaction mixture of claim 26 further comprising a supplemented cell extract.

28. A CFB reaction mixture of claims 26 and 27 also comprising the oligonucleotides, genes, biosynthetic gene clusters, enzymes, proteins, and final peptide products, including lasso precursor peptides, lasso core peptides, lasso peptides, or lasso peptide analogs that result from performing a CFB reaction.

29. A kit for the production of lasso peptides and/or lasso peptide analogs according to any of the preceding claims comprising a CFB reaction mixture, a cell extract or cell extracts, cell extract supplements, a lasso precursor peptide or gene or a library of such, a lasso core peptide or gene or a library of such, a lasso cyclase or gene or genes, and/or a lasso peptidase or gene, along with information about the contents and instructions for producing lasso peptides or lasso peptide analogs.

30. A lasso peptidase library comprising at least two lasso peptidases, wherein the lasso peptidases are encoded by genes of a same organism or encoded by genes of different organisms.

31. The lasso peptidase library of claim 30, wherein each lasso peptidase of the at least two lasso peptidases comprises an amino acid sequence selected from peptide Nos: 1316-2336.

32. The lasso peptidase library of anyone of claims 30-31, wherein the library is produced by a cell-free biosynthesis system.

33. A lasso cyclase library comprising at least two lasso cyclases, wherein the lasso cyclases are encoded by genes of a same organism or encoded by genes of different organisms.

34. The lasso cyclase library of claim 33, wherein each lasso peptidase of the at least two lasso cyclases comprises an amino acid sequence selected from peptide Nos: 2337-3761.

35. The lasso cyclase library of any one of claims 33-34, wherein the library is produced by a cell-free biosynthesis system.

36. A cell free biosynthesis (CFB) system for producing one or more lasso peptide or lasso peptide analogs, wherein the CFB system comprises at least one component capable of producing one or more lasso precursor peptide.

37. The CFB system of claim 36, wherein the CFB system further comprises at least one component capable of producing one or more lasso peptidase.

38. The CFB system of claim 37, wherein the CFB system further comprises at least one component capable of producing one or more lasso cyclase.

39. The CFB system of any one of claims 36-38, wherein the at least one component capable of producing the one or more lasso precursor peptide comprises the one or more lasso precursor peptide.

40. The CFB system of any one of claims 36-39, wherein the one or more lasso precursor peptide is synthesized outside the CFB system.

41. The CFB system of any one of claims 36-39, wherein the one or more lasso precursor peptide is isolated from a naturally-occurring microorganism.

42. The CFB system of any one of claims 36-39, wherein the one or more lasso precursor peptide is isolated from a plurality naturally-occurring microorganisms.

43. The CFB system of claim 41 or 42, wherein the lasso precursor peptide is isolated as a cell extract of the naturally occurring microorganism.

44. The CFB system of any one of claims 36-43, wherein the at least one component capable of producing the one or more lasso precursor peptide comprises a polynucleotide encoding for the one or more lasso precursor peptide.

45. The CFB system of claim 44, wherein the polynucleotide comprises a genomic sequence of a naturally-existing microbial organism.

46. The CFB system of claim 45, wherein the polynucleotide comprises a mutated genomic sequence of a naturally-existing microbial organism.

47. The CFB system of any one of claims 44 to 46, wherein the polynucleotide comprises a plurality polynucleotides.

48. The CFB system of claim 47, wherein the plurality of polynucleotides each comprises a genomic sequence of a naturally existing microbial organism and/or a mutated genomic sequence of a naturally existing microbial organism.

49. The CFB system of claim 47, wherein at least two of the plurality of polynucleotides comprise genomic sequences or mutated genomic sequences of different naturally existing microbial organisms.

50. The CFB system of any one of claims 43 to 49 wherein the polynucleotide comprises a sequence selected from the odd numbers of SEQ ID Nos: 1-2630 or a homologous sequence thereof.

51. The CFB system of any one of claims 36-50, wherein the at least one component capable of producing the one or more lasso peptidase comprises the one or more lasso peptidase.

52. The CFB system of any one of claims 36-51, wherein the one or more lasso peptidase is synthesized outside the CFB system.

53. The CFB system of any one of claims 36-52, wherein the one or more lasso peptidase is isolated from a naturally-occurring microorganism.

54. The CFB system of claim 53, wherein the lasso peptidase is isolated as a cell extract of the naturally occurring microorganism.

55. The CFB system of any one of claims 36-54, wherein the at least one component capable of producing the one or more lasso peptidase comprises a polynucleotide encoding for the one or more lasso peptidase.

56. The CFB system of claim 55, wherein the polynucleotide encoding for the lasso peptidase comprises a genomic sequence of a naturally-existing microbial organism.

57. The CFB system of claim 56, wherein the polynucleotide encoding for the one or more lasso peptidase comprises a plurality of polynucleotide encoding for the one or more lasso peptidase.

58. The CFB system of claim 55 or 56, wherein the plurality of polynucleotides each comprises a genomic sequence of a naturally existing microbial organism.

59. The CFB system of claim 58, wherein at least two of the plurality of polynucleotides encoding the one or more lasso peptidase comprise genomic sequences of different naturally existing microbial organisms.

60. The CFB system of any one of claims 36-59, wherein the at least one component capable of producing the one or more lasso cyclase comprises the one or more lasso cyclase.

61. The CFB system of any one of claims 36-60, wherein the one or more lasso cyclase is synthesized outside the CFB system.

62. The CFB system of any one of claims 36-61, wherein the one or more lasso cyclase is isolated from a naturally-occurring microorganism.

63. The CFB system of any one of claims 36-61, wherein at least two of the one or more lasso cyclases are isolated from different naturally-occurring microorganisms.

64. The CFB system of claim 62 or 63, wherein the lasso peptidase is isolated as a cell extract of the naturally occurring microorganism.

65. The CFB system of any one of claims 36-64, wherein the at least one component capable of producing the one or more lasso cyclase comprises a polynucleotide encoding for the one or more lasso cyclase.

66. The CFB system of any one of claims 36-64, wherein the at least one component capable of producing the one or more lasso cyclase comprises a plurality of polynucleotides encoding for the one or more lasso cyclase.

67. The CFB system of claim 65 or 66, wherein the polynucleotide encoding for the lasso cyclase comprises a genomic sequence of a naturally-existing microbial organism.

68. The CFB system of claim 66 or 67, wherein at least two of the plurality of polynucleotides encoding the one or more lasso cyclase comprise genomic sequences of different naturally existing microbial organisms.

69. The CFB system of any one of claims 43 to 68, wherein the one or more lasso precursor peptide each comprises an amino acid sequence selected from the even number of SEQ ID Nos: 1-2630 or a homologous sequence having at least 30% sequence identity to the even number of SEQ ID Nos: 1-2630.

70. The CFB system of any one of claims 43 to 69, wherein the one or more lasso peptidase each comprises an amino acid sequence selected from peptide Nos: 1316-2336.

71. The CFB system of any one of claims 43 to 70, wherein the one or more lasso peptidase each comprises an amino acid sequence selected from peptide Nos: 2337-3761.

72. The CFB system of anyone of claims 43 to 71, further comprises at least one component capable of producing one or more RIPP recognition element (RRE).

73. The CFB system of claim 72, wherein the one or more RRE each comprises an amino acid sequence selected from peptide Nos: 3762-4593.

74. The CFB system of claim 72 or 73, wherein the at least one component capable of producing the one or more RRE comprises the one more RRE.

75. The CFB system of claim 72 or 74, wherein the RRE comprises at least one component capable of producing the one or more RRE comprises a polynucleotide encoding for the one or more RRE.

76. The CFB system of claim 75, wherein the polynucleotide encoding for the one or more RRE comprises a plurality of polynucleotides encoding for the one or more RRE.

77. The CFB system of claim 75 or 76, wherein the polynucleotide encoding for the one or more RRE comprises a genomic sequence or a naturally existing microorganism.

78. The CFB system of claim 76, wherein at least two of the plurality of polynucleotides encoding the one or more RREs comprise genomic sequences of different naturally existing microbial organisms.

79. The CFB system according to any one of claims 36 to 78 wherein the CFB system comprises a minimal set of lasso biosynthesis components.

80. The CFB system according to any one of claims 36-79, wherein the CFB system is capable of producing a combination of (i) lasso precursor peptide or a lasso core peptide, (ii) lasso cyclase, and (iii) lasso peptidase as listed in Table 1.

81. The CFB system according to any one of claims 36-79, wherein the CFB system is capable of producing a lasso peptide library.

82. The CFB system according to any one of claims 36-81, wherein the CFB system comprises a cell extract.

83. The CFB system according to any one of claims 36-82, wherein the CFB system comprises a supplemented cell extract.

84. The CFB system according to any one of claims 36-83, wherein the CFB system comprises a CFB reaction mixture.

85. The CFB system according to any one of claims 36-84, wherein the CFB system is capable of producing at least one lasso peptide or lasso peptide analog when incubated under a suitable condition.

86. The CFB system according to claim 85, wherein the suitable condition is a substantially anaerobic condition.

87. The CFB system according to claim 85, wherein the CFB comprises a cell extract, and the suitable condition comprises the natural growth condition of the cell where the cell extract is derived.

88. The CFB system according to any one of claims 36-87, wherein the CFB system is in the form of a kit.

89. The CFB system according to claim 88, wherein the one or more components of the CFB systems are separated into a plurality of parts forming the kit.

90. The CFB system according to claim 89, the plurality of parts forming the kit, when separated from one another, are substantially free of chemical or biochemical activity.

The application's sequence listing, which the Patent Office published only in electronic form, follows.

SEQUENCE LISTING (2652 sequences)

SEQ ID NO: 1 - DNA, 120 bp, Caulobacter sp.
  CDS (1)..(120)
atgactcaagtctctccctcgcccctgcggctcatccgtgtcgggcgcgccctcgatctgacccgttcgatcggcgactccggtctgcgggagtccatgagctcgcagacctactggccc

SEQ ID NO: 2 - protein, 40 aa, Caulobacter sp.
MTQVSPSPLRLIRVGRALDLTRSIGDSGLRESMSSQTYWP

SEQ ID NO: 3 - DNA, 117 bp, Caulobacter sp.
  CDS (1)..(117)
atgaccccgatccaatccaagttctgccttctgcgcgtcggttcggccaagcgcctgacccagtccttcgatgtcggcaccatcaaggaaggtctcgtcagccaatactacttcgcc

SEQ ID NO: 4 - protein, 39 aa, Caulobacter sp.
MTPIQSKFCLLRVGSAKRLTQSFDVGTIKEGLVSQYYFA

SEQ ID NO: 5 - DNA, 117 bp, Caulobacter sp.; identical to SEQ ID NO: 3
  CDS (1)..(117)

SEQ ID NO: 6 - protein, 39 aa, Caulobacter sp.; identical to SEQ ID NO: 4

SEQ ID NO: 7 - DNA, 120 bp, Caulobacter sp.; identical to SEQ ID NO: 1
  CDS (1)..(120)

SEQ ID NO: 8 - protein, 40 aa, Caulobacter sp.; identical to SEQ ID NO: 2

SEQ ID NO: 9 - DNA, 117 bp, Caulobacter henricii
  CDS (1)..(117)
atgacccccgtcaccccgcgcgtcgccctgctgcgtctgggcgccgccaagtccctgacccggtccatcgaggaggggacgatcaaggaagccggcagcagccagtactacttcgtc

SEQ ID NO: 10 - protein, 39 aa, Caulobacter henricii
MTPVTPRVALLRLGAAKSLTRSIEEGTIKEAGSSQYYFV

SEQ ID NO: 11 - DNA, 117 bp, Caulobacter henricii
  CDS (1)..(117)
atgtccaagttcaccgcgacccttcgcgtgatccgcctcggcggcgcgctcgatctgacccgctcggtcgacgacgagggcctgcgcgagccgatgcaaccccagctcgcctggttc

SEQ ID NO: 12 - protein, 39 aa, Caulobacter henricii
MSKFTATLRVIRLGGALDLTRSVDDEGLREPMQPQLAWF

SEQ ID NO: 13 - DNA, 117 bp, Caulobacter henricii
  CDS (1)..(117)
atgacccccgtcaccccgcgcgtcgctctgctgcgtctgggcgccgccaagtccctgacccggtccatcgaggatgggacgatcaaggaagccggcagcagccagtactacttcgtc

SEQ ID NO: 14 - protein, 39 aa, Caulobacter henricii
MTPVTPRVALLRLGAAKSLTRSIEDGTIKEAGSSQYYFV

SEQ ID NO: 15 - DNA, 117 bp, Caulobacter henricii; identical to SEQ ID NO: 11
  CDS (1)..(117)

SEQ ID NO: 16 - protein, 39 aa, Caulobacter henricii; identical to SEQ ID NO: 12

SEQ ID NO: 17 - DNA, 102 bp, Actinobacteria bacterium
  CDS (1)..(102)
atgctccaggaagtcggcgacttcgaggagctcacgaagtgcctcggcgtcggaagctgcaacgacttcgccggctgcggctacgcgatcgtctgcttctgg

SEQ ID NO: 18 - protein, 34 aa, Actinobacteria bacterium
MLQEVGDFEELTKCLGVGSCNDFAGCGYAIVCFW

SEQ ID NO: 19 - DNA, 102 bp, Actinobacteria bacterium; identical to SEQ ID NO: 17
  CDS (1)..(102)

SEQ ID NO: 20 - protein, 34 aa, Actinobacteria bacterium; identical to SEQ ID NO: 18

SEQ ID NO: 21 - DNA, 126 bp, Streptomyces griseorubens
  CDS (1)..(126)
atgaccgcgatctacgagccgcccgccctgcaggagatcggcgacttcgacgagctcaccaagtgcctcggcatcgggagctgcaacgacttcgccggctgcggttacgccgtcgtctgcttctgg

SEQ ID NO: 22 - protein, 42 aa, Streptomyces griseorubens
MTAIYEPPALQEIGDFDELTKCLGIGSCNDFAGCGYAVVCFW

SEQ ID NO: 23 - DNA, 126 bp, Streptomyces griseorubens; identical to SEQ ID NO: 21
  CDS (1)..(126)

SEQ ID NO: 24 - protein, 42 aa, Streptomyces griseorubens; identical to SEQ ID NO: 22

SEQ ID NO: 25 - DNA, 126 bp, Streptomyces griseorubens; identical to SEQ ID NO: 21
  CDS (1)..(126)

SEQ ID NO: 26 - protein, 42 aa, Streptomyces griseorubens; identical to SEQ ID NO: 22

SEQ ID NO: 27 - DNA, 126 bp, Streptomyces sp.
  CDS (1)..(126)
atgtccgccacgtacgagccccccgcgttgcaggagatcggcgacttcgacgagctcaccaagtgcctcggcgtcgggagctgcaacgacttcgccggctgcggctacgccatcgtctgcttctgg

SEQ ID NO: 28 - protein, 42 aa, Streptomyces sp.
MSATYEPPALQEIGDFDELTKCLGVGSCNDFAGCGYAIVCFW

SEQ ID NO: 29 - DNA, 141 bp, Burkholderia thailandensis
  CDS (1)..(141)
atggttcgacttttggcgaagctgcttcgttcgacgatccacggctccaacggtgtcagcctggacgcggtttcctcgacgcacggcaccccgggtttccaaaccccggacgctcgcgtcatttcgcgctttgggttcaat

SEQ ID NO: 30 - protein, 47 aa, Burkholderia thailandensis
MVRLLAKLLRSTIHGSNGVSLDAVSSTHGTPGFQTPDARVISRFGFN

SEQ ID NO: 31 - DNA, 141 bp, Burkholderia thailandensis; identical to SEQ ID NO: 29
  CDS (1)..(141)

SEQ ID NO: 32 - protein, 47 aa, Burkholderia thailandensis; identical to SEQ ID NO: 30

SEQ ID NO: 33 - DNA, 141 bp, Burkholderia thailandensis; identical to SEQ ID NO: 29
  CDS (1)..(141)

SEQ ID NO: 34 - protein, 47 aa, Burkholderia thailandensis; identical to SEQ ID NO: 30

SEQ ID NO: 35 - DNA, 141 bp, Burkholderia thailandensis; identical to SEQ ID NO: 29
  CDS (1)..(141)

SEQ ID NO: 36 - protein, 47 aa, Burkholderia thailandensis; identical to SEQ ID NO: 30

SEQ ID NO: 37 - DNA, 141 bp, Burkholderia thailandensis; identical to SEQ ID NO: 29
  CDS (1)..(141)

SEQ ID NO: 38 - protein, 47 aa, Burkholderia thailandensis; identical to SEQ ID NO: 30

SEQ ID NO: 39 - DNA, 141 bp, Burkholderia thailandensis; identical to SEQ ID NO: 29
  CDS (1)..(141)

SEQ ID NO: 40 - protein, 47 aa, Burkholderia thailandensis; identical to SEQ ID NO: 30

SEQ ID NO: 41 - DNA, 141 bp, Burkholderia thailandensis; identical to SEQ ID NO: 29
  CDS (1)..(141)

SEQ ID NO: 42 - protein, 47 aa, Burkholderia thailandensis; identical to SEQ ID NO: 30

SEQ ID NO: 43 - DNA, 141 bp, Burkholderia thailandensis; identical to SEQ ID NO: 29
  CDS (1)..(141)

SEQ ID NO: 44 - protein, 47 aa, Burkholderia thailandensis; identical to SEQ ID NO: 30

SEQ ID NO: 45 - DNA, 141 bp, Burkholderia oklahomensis
  CDS (1)..(141)
atggttcgatttttggcgaagctgcttcgttcgacgatccacggctccaacggtgtcagccttgacgcggtttcctcgactcatggcactccgggcttccaaacgccggacgctcgcgtcatttcgcgcttcgggttcaat

SEQ ID NO: 46 - protein, 47 aa, Burkholderia oklahomensis
MVRFLAKLLRSTIHGSNGVSLDAVSSTHGTPGFQTPDARVISRFGFN

SEQ ID NO: 47 - DNA, 141 bp, Burkholderia mallei
  CDS (1)..(141)
atggttcgatttttggcgaagctgcttcgttcgacgatccacggctcccacggtgtcagccttgacgcggtttcctcgactcacggcacgccgggcttccaaaccccggacgcacgcgtcatttcgcgcttcgggttcaat

SEQ ID NO: 48 - protein, 47 aa, Burkholderia mallei
MVRFLAKLLRSTIHGSHGVSLDAVSSTHGTPGFQTPDARVISRFGFN

SEQ ID NO: 49 - DNA, 141 bp, Burkholderia oklahomensis; identical to SEQ ID NO: 45
  CDS (1)..(141)

SEQ ID NO: 50 - protein, 47 aa, Burkholderia oklahomensis; identical to SEQ ID NO: 46

SEQ ID NO: 51 - DNA, 141 bp, Burkholderia mallei; identical to SEQ ID NO: 47
  CDS (1)..(141)

SEQ ID NO: 52 - protein, 47 aa, Burkholderia mallei; identical to SEQ ID NO: 48

SEQ ID NO: 53 - DNA, 141 bp, Burkholderia mallei; identical to SEQ ID NO: 47
  CDS (1)..(141)

SEQ ID NO: 54 - protein, 47 aa, Burkholderia mallei; identical to SEQ ID NO: 48

SEQ ID NO: 55 - DNA, 141 bp, Burkholderia mallei; identical to SEQ ID NO: 47
  CDS (1)..(141)

SEQ ID NO: 56 - protein, 47 aa, Burkholderia mallei; identical to SEQ ID NO: 48

SEQ ID NO: 57 - DNA, 141 bp, Burkholderia mallei; identical to SEQ ID NO: 47
  CDS (1)..(141)

SEQ ID NO: 58 - protein, 47 aa, Burkholderia mallei; identical to SEQ ID NO: 48

SEQ ID NO: 59 - DNA, 141 bp, Burkholderia mallei; identical to SEQ ID NO: 47
  CDS (1)..(141)

SEQ ID NO: 60 - protein, 47 aa, Burkholderia mallei; identical to SEQ ID NO: 48

SEQ ID NO: 61 - DNA, 141 bp, Burkholderia mallei; identical to SEQ ID NO: 47
  CDS (1)..(141)

SEQ ID NO: 62 - protein, 47 aa, Burkholderia mallei; identical to SEQ ID NO: 48

SEQ ID NO: 63 - DNA, 141 bp, Burkholderia mallei; identical to SEQ ID NO: 47
  CDS (1)..(141)

SEQ ID NO: 64 - protein, 47 aa, Burkholderia mallei; identical to SEQ ID NO: 48

SEQ ID NO: 65 - DNA, 141 bp, Burkholderia mallei; identical to SEQ ID NO: 47
  CDS (1)..(141)

SEQ ID NO: 66 - protein, 47 aa, Burkholderia mallei; identical to SEQ ID NO: 48

SEQ ID NO: 67 - DNA, 141 bp, Burkholderia mallei; identical to SEQ ID NO: 47
  CDS (1)..(141)

SEQ ID NO: 68 - protein, 47 aa, Burkholderia mallei; identical to SEQ ID NO: 48

SEQ ID NO: 69 - DNA, 141 bp, Burkholderia mallei; identical to SEQ ID NO: 47
  CDS (1)..(141)

SEQ ID NO: 70 - protein, 47 aa, Burkholderia mallei; identical to SEQ ID NO: 48

SEQ ID NO: 71 - DNA, 141 bp, Burkholderia mallei; identical to SEQ ID NO: 47
  CDS (1)..(141)

SEQ ID NO: 72 - protein, 47 aa, Burkholderia mallei; identical to SEQ ID NO: 48

SEQ ID NO: 73 - DNA, 141 bp, Burkholderia mallei; identical to SEQ ID NO: 47
  CDS (1)..(141)

SEQ ID NO: 74 - protein, 47 aa, Burkholderia mallei; identical to SEQ ID NO: 48

SEQ ID NO: 75 - DNA, 141 bp, Burkholderia mallei; identical to SEQ ID NO: 47
  CDS (1)..(141)

SEQ ID NO: 76 - protein, 47 aa, Burkholderia mallei; identical to SEQ ID NO: 48

SEQ ID NO: 77 - DNA, 141 bp, Burkholderia mallei; identical to SEQ ID NO: 47
  CDS (1)..(141)

SEQ ID NO: 78 - protein, 47 aa, Burkholderia mallei; identical to SEQ ID NO: 48

SEQ ID NO: 79 - DNA, 141 bp, Burkholderia mallei; identical to SEQ ID NO: 47
  CDS (1)..(141)

SEQ ID NO: 80 - protein, 47 aa, Burkholderia mallei; identical to SEQ ID NO: 48

SEQ ID NO: 81 - DNA, 141 bp, Burkholderia mallei; identical to SEQ ID NO: 47
  CDS (1)..(141)

SEQ ID NO: 82 - protein, 47 aa, Burkholderia mallei; identical to SEQ ID NO: 48

SEQ ID NO: 83 - DNA, 141 bp, Burkholderia mallei; identical to SEQ ID NO: 47
  CDS (1)..(141)

SEQ ID NO: 84 - protein, 47 aa, Burkholderia mallei; identical to SEQ ID NO: 48

SEQ ID NO: 85 - DNA, 141 bp, Burkholderia mallei; identical to SEQ ID NO: 47
  CDS (1)..(141)

SEQ ID NO: 86 - protein, 47 aa, Burkholderia mallei; identical to SEQ ID NO: 48

SEQ ID NO: 87 - DNA, 141 bp, Burkholderia mallei; identical to SEQ ID NO: 47
  CDS (1)..(141)

SEQ ID NO: 88 - protein, 47 aa, Burkholderia mallei; identical to SEQ ID NO: 48

SEQ ID NO: 89 - DNA, 141 bp, Burkholderia mallei; identical to SEQ ID NO: 47
  CDS (1)..(141)

SEQ ID NO: 90 - protein, 47 aa, Burkholderia mallei; identical to SEQ ID NO: 48

SEQ ID NO: 91 - DNA, 141 bp, Burkholderia mallei; identical to SEQ ID NO: 47
  CDS (1)..(141)

SEQ ID NO: 92 - protein, 47 aa, Burkholderia mallei; identical to SEQ ID NO: 48

SEQ ID NO: 93 - DNA, 141 bp, Burkholderia mallei; identical to SEQ ID NO: 47
  CDS (1)..(141)

SEQ ID NO: 94 - protein, 47 aa, Burkholderia mallei; identical to SEQ ID NO: 48

SEQ ID NO: 95 - DNA, 141 bp, Burkholderia mallei; identical to SEQ ID NO: 47
  CDS (1)..(141)

SEQ ID NO: 96 - protein, 47 aa, Burkholderia mallei; identical to SEQ ID NO: 48

SEQ ID NO: 97 - DNA, 141 bp, Burkholderia mallei; identical to SEQ ID NO: 47
  CDS (1)..(141)

SEQ ID NO: 98 - protein, 47 aa, Burkholderia mallei; identical to SEQ ID NO: 48

SEQ ID NO: 99 - DNA, 141 bp, Burkholderia mallei; identical to SEQ ID NO: 47
  CDS (1)..(141)

SEQ ID NO: 100 - protein, 47 aa, Burkholderia mallei; identical to SEQ ID NO: 48

SEQ ID NO: 101 - DNA, 141 bp, Burkholderia mallei; identical to SEQ ID NO: 47
  CDS (1)..(141)

SEQ ID NO: 102 - protein, 47 aa, Burkholderia mallei; identical to SEQ ID NO: 48

SEQ ID NO: 103 - DNA, 141 bp, Burkholderia mallei; identical to SEQ ID NO: 47
  CDS (1)..(141)

SEQ ID NO: 104 - protein, 47 aa, Burkholderia mallei; identical to SEQ ID NO: 48

SEQ ID NO: 105 - DNA, 141 bp, Burkholderia mallei; identical to SEQ ID NO: 47
  CDS (1)..(141)

SEQ ID NO: 106 - protein, 47 aa, Burkholderia mallei; identical to SEQ ID NO: 48

SEQ ID NO: 107 - DNA, 141 bp, Burkholderia mallei; identical to SEQ ID NO: 47
  CDS (1)..(141)

SEQ ID NO: 108 - protein, 47 aa, Burkholderia mallei; identical to SEQ ID NO: 48

SEQ ID NO: 109 - DNA, 141 bp, Burkholderia mallei; identical to SEQ ID NO: 47
  CDS (1)..(141)

SEQ ID NO: 110 - protein, 47 aa, Burkholderia mallei; identical to SEQ ID NO: 48

SEQ ID NO: 111 - DNA, 141 bp, Burkholderia mallei; identical to SEQ ID NO: 47
  CDS (1)..(141)

SEQ ID NO: 112 - protein, 47 aa, Burkholderia mallei; identical to SEQ ID NO: 48

SEQ ID NO: 113 - DNA, 141 bp, Burkholderia mallei; identical to SEQ ID NO: 47
  CDS (1)..(141)

SEQ ID NO: 114 - protein, 47 aa, Burkholderia mallei; identical to SEQ ID NO: 48

SEQ ID NO: 115 - DNA, 141 bp, Burkholderia mallei; identical to SEQ ID NO: 47
  CDS (1)..(141)

SEQ ID NO: 116 - protein, 47 aa, Burkholderia mallei; identical to SEQ ID NO: 48

SEQ ID NO: 117 - DNA, 141 bp, Burkholderia mallei; identical to SEQ ID NO: 47
  CDS (1)..(141)

SEQ ID NO: 118 - protein, 47 aa, Burkholderia mallei; identical to SEQ ID NO: 48

SEQ ID NO: 119 - DNA, 141 bp, Burkholderia mallei; identical to SEQ ID NO: 47
  CDS (1)..(141)

SEQ ID NO: 120 - protein, 47 aa, Burkholderia mallei; identical to SEQ ID NO: 48

SEQ ID NO: 121 - DNA, 141 bp, Burkholderia mallei; identical to SEQ ID NO: 47
  CDS (1)..(141)

SEQ ID NO: 122 - protein, 47 aa, Burkholderia mallei; identical to SEQ ID NO: 48

SEQ ID NO: 123 - DNA, 141 bp, Burkholderia mallei; identical to SEQ ID NO: 47
  CDS (1)..(141)

SEQ ID NO: 124 - protein, 47 aa, Burkholderia mallei; identical to SEQ ID NO: 48

SEQ ID NO: 125 - DNA, 141 bp, Burkholderia mallei; identical to SEQ ID NO: 47
  CDS (1)..(141)

SEQ ID NO: 126 - protein, 47 aa, Burkholderia mallei; identical to SEQ ID NO: 48

SEQ ID NO: 127 - DNA, 141 bp, Burkholderia mallei; identical to SEQ ID NO: 47
  CDS (1)..(141)

SEQ ID NO: 128 - protein, 47 aa, Burkholderia mallei; identical to SEQ ID NO: 48

SEQ ID NO: 129 - DNA, 141 bp, Burkholderia mallei; identical to SEQ ID NO: 47
  CDS (1)..(141)

SEQ ID NO: 130 - protein, 47 aa, Burkholderia mallei; identical to SEQ ID NO: 48

SEQ ID NO: 131 - DNA, 141 bp, Burkholderia mallei; identical to SEQ ID NO: 47
  CDS (1)..(141)

SEQ ID NO: 132 - protein, 47 aa, Burkholderia mallei; identical to SEQ ID NO: 48

SEQ ID NO: 133 - DNA, 141 bp, Burkholderia mallei; identical to SEQ ID NO: 47
  CDS (1)..(141)

SEQ ID NO: 134 - protein, 47 aa, Burkholderia mallei; identical to SEQ ID NO: 48

SEQ ID NO: 135 - DNA, 141 bp, Burkholderia sp.
  CDS (1)..(141)
atggttcgacttttggcgaagcttctccgtatcacggcccaaggctccagcggcgtcagcctggacgcggtttcctcgacgcacggcacgccgggcttccaaacgccggacaatcgcgtcatttcgcgcttcggattcaat

SEQ ID NO: 136 - protein, 47 aa, Burkholderia sp.
MVRLLAKLLRITAQGSSGVSLDAVSSTHGTPGFQTPDNRVISRFGFN

SEQ ID NO: 137 - DNA, 141 bp, Burkholderia thailandensis; identical to SEQ ID NO: 29
  CDS (1)..(141)

SEQ ID NO: 138 - protein, 47 aa, Burkholderia thailandensis; identical to SEQ ID NO: 30

SEQ ID NO: 139 - DNA, 141 bp, Burkholderia mallei; identical to SEQ ID NO: 47
  CDS (1)..(141)

SEQ ID NO: 140 - protein, 47 aa, Burkholderia mallei; identical to SEQ ID NO: 48

SEQ ID NO: 141 - DNA, 141 bp, Burkholderia oklahomensis; identical to SEQ ID NO: 45
  CDS (1)..(141)

SEQ ID NO: 142 - protein, 47 aa, Burkholderia oklahomensis; identical to SEQ ID NO: 46

SEQ ID NO: 143 - DNA, 141 bp, Burkholderia oklahomensis; identical to SEQ ID NO: 45
  CDS (1)..(141)

SEQ ID NO: 144 - protein, 47 aa, Burkholderia oklahomensis; identical to SEQ ID NO: 46

SEQ ID NO: 145 - DNA, 120 bp, Streptomyces leeuwenhoekii
  CDS (1)..(120)
atgactgagcttcagccggaggcctacgaggcgccgtccctcatcgaggtgggcgagttctcggaggacacgctcggcttcggaagcaagccgctggacagcttcggcctgaacttcttt

SEQ ID NO: 146 - protein, 40 aa, Streptomyces leeuwenhoekii
MTELQPEAYEAPSLIEVGEFSEDTLGFGSKPLDSFGLNFF

SEQ ID NO: 147 - DNA, 132 bp, Streptomyces sp.
  CDS (1)..(132)
atggaagagcagaacgagctgtccaccgtggagccctacgccgccccgatgctggtcgaggtcggtgagttcaacgaggacaccctgggcttcatcggctggggcaaggacatcttcggccactacggcggc

SEQ ID NO: 148 - protein, 44 aa, Streptomyces sp.
MEEQNELSTVEPYAAPMLVEVGEFNEDTLGFIGWGKDIFGHYGG

SEQ ID NO: 149 - DNA, 135 bp, Streptomyces chattanoogensis
  CDS (1)..(135)
atggaagagcagaacgagctctcgaacgtagagccctacgcgcccccgatgctggtcgaggtcggcgagttcagcgaggacacgctgggcttcatcggctggggcaaggacatcttcggccactacggcggccgc

SEQ ID NO: 150 - protein, 45 aa, Streptomyces chattanoogensis
MEEQNELSNVEPYAPPMLVEVGEFSEDTLGFIGWGKDIFGHYGGR

SEQ ID NO: 151 - DNA, 135 bp, Streptomyces chattanoogensis; identical to SEQ ID NO: 149
  CDS (1)..(135)

SEQ ID NO: 152 - protein, 45 aa, Streptomyces chattanoogensis; identical to SEQ ID NO: 150

SEQ ID NO: 153 - DNA, 132 bp, Streptomyces sp.; identical to SEQ ID NO: 147
  CDS (1)..(132)

SEQ ID NO: 154 - protein, 44 aa, Streptomyces sp.; identical to SEQ ID NO: 148

SEQ ID NO: 155 - DNA, 138 bp, Streptomyces olindensis
  CDS (1)..(138)
atggacgagcagaccgagttctcgaccaccgagccgtacgcgccgccgacgctgaccgaggtcggcgagttcaacgaggacaccctcggcttcatcggctggggcgacgacatcttcggccactactccggcgacttc

SEQ ID NO: 156 - protein, 46 aa, Streptomyces olindensis
MDEQTEFSTTEPYAPPTLTEVGEFNEDTLGFIGWGDDIFGHYSGDF

SEQ ID NO: 157 - DNA, 135 bp, Streptomyces chattanoogensis; identical to SEQ ID NO: 149
  CDS (1)..(135)

SEQ ID NO: 158 - protein, 45 aa, Streptomyces chattanoogensis; identical to SEQ ID NO: 150

SEQ ID NO: 159 - DNA, 96 bp, Streptomyces bingchenggensis
  CDS (1)..(96)
atggtcacggaagccggtgacttcagcgaggtcacggccggcagcatcttcggtttccagtacgacggtggcttttacccgtacagccagtacggc

SEQ ID NO: 160 - protein, 32 aa, Streptomyces bingchenggensis
MVTEAGDFSEVTAGSIFGFQYDGGFYPYSQYG

SEQ ID NO: 161 - DNA, 132 bp, Streptomyces bingchenggensis
  CDS (1)..(132)
atgcaggcgagatcggacgagaccgtcgagagctacgaaccgccggccctggtggcggtgggtgagttctcggaggacacgctggggttcggccaccggtacgaggatgtgctcggtgagcagggctggggg

SEQ ID NO: 162 - protein, 44 aa, Streptomyces bingchenggensis
MQARSDETVESYEPPALVAVGEFSEDTLGFGHRYEDVLGEQGWG

SEQ ID NO: 163 - DNA, 138 bp, Streptomyces olindensis; identical to SEQ ID NO: 155
  CDS (1)..(138)

SEQ ID NO: 164 - protein, 46 aa, Streptomyces olindensis; identical to SEQ ID NO: 156

SEQ ID NO: 165 - DNA, 138 bp, Streptomyces sp.
  CDS (1)..(138)
atgaacgagaacatcgagatctcgaactccgagccgtacgagccgccgaccgtggtggaggtcggagagttcaacgaggacaccctgggcttcatcggctggggcaaggacatcttcggccactactcgggcggcttc

SEQ ID NO: 166 - protein, 46 aa, Streptomyces sp.
MNENIEISNSEPYEPPTVVEVGEFNEDTLGFIGWGKDIFGHYSGGF

SEQ ID NO: 167 - DNA, 141 bp, Streptomyces aurantiacus
  CDS (1)..(141)
atggaagagcagacggggatcgacgagcgcgacacggccgcgagctacgagccgccggccctcatcgccgtcggtgagttctccgaggacacgctgggcttcggcaaccggtacaacgacgttctcggcgagcagggctgg

SEQ ID NO: 168 - protein, 47 aa, Streptomyces aurantiacus
MEEQTGIDERDTAASYEPPALIAVGEFSEDTLGFGNRYNDVLGEQGW

SEQ ID NO: 169 - DNA, 132 bp, Streptomyces auratus
  CDS (1)..(132)
atgaccgagcagtccgagcagacacccgcggaatacattccgccgatgctcgtcgaggtcggcgagttcaccgaagacacgttgggcaactggcacggcacatcgcccgactggttcttcaactactactgg

SEQ ID NO: 170 - protein, 44 aa, Streptomyces auratus
MTEQSEQTPAEYIPPMLVEVGEFTEDTLGNWHGTSPDWFFNYYW

SEQ ID NO: 171 - DNA, 141 bp, Streptomyces griseus
  CDS (1)..(141)
atggagaaccagcagcagcgcgaggagccgtcggttcagcagggctacgagccgcccgcgctgacggccgtcggggagttttcggaggacacgctcggcttcggcagcgaccactccgacttcctcgccaagcaaggctgg

SEQ ID NO: 172 - protein, 47 aa, Streptomyces griseus
MENQQQREEPSVQQGYEPPALTAVGEFSEDTLGFGSDHSDFLAKQGW

SEQ ID NO: 173 - DNA, 132 bp, Streptomyces auratus; identical to SEQ ID NO: 169
  CDS (1)..(132)

SEQ ID NO: 174 - protein, 44 aa, Streptomyces auratus; identical to SEQ ID NO: 170

SEQ ID NO: 175 - DNA, 96 bp, Streptomyces bingchenggensis; identical to SEQ ID NO: 159
  CDS (1)..(96)

SEQ ID NO: 176 - protein, 32 aa, Streptomyces bingchenggensis; identical to SEQ ID NO: 160

SEQ ID NO: 177 - DNA, 132 bp, Streptomyces bingchenggensis; identical to SEQ ID NO: 161
  CDS (1)..(132)

SEQ ID NO: 178 - protein, 44 aa, Streptomyces bingchenggensis; identical to SEQ ID NO: 162

SEQ ID NO: 179 - DNA, 129 bp, Streptomyces sp.
  CDS (1)..(129)
atggaagaacaggaagctccggacactgtctaccaaccgccgatgctggccgagctcggcgaattcagtgaggacacgctgggaatcggtcacttcttctcggacggcgccggcggttacatcgttgtc

SEQ ID NO: 180 - protein, 43 aa, Streptomyces sp.
MEEQEAPDTVYQPPMLAELGEFSEDTLGIGHFFSDGAGGYIVV

SEQ ID NO: 181 - DNA, 123 bp, Microbispora rosea
  CDS (1)..(123)
atggctaagcagtcttacgtcgctccggtcctggaggaaattggcgggttccgtgaagtgacaaacggctacccctggtgggactaccgcgacctcttcggtgggcacacgttcatctcaccg

SEQ ID NO: 182 - protein, 41 aa, Microbispora rosea
MAKQSYVAPVLEEIGGFREVTNGYPWWDYRDLFGGHTFISP

SEQ ID NO: 183 - DNA, 174 bp, Escherichia coli
  CDS (1)..(174)
atgattaagcattttcattttaataaactgtcttctggtaaaaaaaataatgttccatctcctgcaaagggggttatacaaataaaaaaatcagcatcgcaactcacaaaaggtggtgcaggacatgtgcctgagtattttgtggggattggtacacctatatctttctatggc

SEQ ID NO: 184 - protein, 58 aa, Escherichia coli
MIKHFHFNKLSSGKKNNVPSPAKGVIQIKKSASQLTKGGAGHVPEYFVGIGTPISFYG

SEQ ID NO: 185 - DNA, 174 bp, Escherichia coli; identical to SEQ ID NO: 183
  CDS (1)..(174)

SEQ ID NO: 186 - protein, 58 aa, Escherichia coli; identical to SEQ ID NO: 184

SEQ ID NO: 187 - DNA, 138 bp, Rhodanobacter thiooxydans
  CDS (1)..(138)
atggacacgaacgagaacatccgcagcaacgcgcaggacgatgtcatcgagctcagcgtcgccagtgtcgagaccaaaggagtattgcccatcggcaatgagttcatgggccacgccgccactccgggaatcaccgag

SEQ ID NO: 188 - protein, 46 aa, Rhodanobacter thiooxydans
MDTNENIRSNAQDDVIELSVASVETKGVLPIGNEFMGHAATPGITE

SEQ ID NO: 189 - DNA, 138 bp, Rhodanobacter thiooxydans; identical to SEQ ID NO: 187
  CDS (1)..(138)

SEQ ID NO: 190 - protein, 46 aa, Rhodanobacter thiooxydans; identical to SEQ ID NO: 188

SEQ ID NO: 191 - DNA, 138 bp, Pseudoxanthomonas suwonensis
  CDS (1)..(138)
atgaacgcgaacgagaacacccgtaccaacccgccggaagacgtcgtcgtgctcggcacggccagcgtggaaaccaagggcgccggcgagcctggcaacgagatcctcgggttcgtgaccggggtcggaattgccgaa

SEQ ID NO: 192 - protein, 46 aa, Pseudoxanthomonas suwonensis
MNANENTRTNPPEDVVVLGTASVETKGAGEPGNEILGFVTGVGIAE

SEQ ID NO: 193 - DNA, 123 bp, Streptomonospora alba
  CDS (1)..(123)
atgagcgcttacgagatccccactctcacccgtatcggcaagttcaaggacgtcaccaagagcctcggcagctccccctacaacgacatcctgggctacccggctctgatcgtcatctacccg

SEQ ID NO: 194 - protein, 41 aa, Streptomonospora alba
MSAYEIPTLTRIGKFKDVTKSLGSSPYNDILGYPALIVIYP

SEQ ID NO: 195 - DNA, 93 bp, Streptacidiphilus jiangxiensis
  CDS (1)..(93)
atggcaccggccctcgtcgaggtcggtgagttcaacgaggacaccctcggtggctggggcacggttcccgactggttcttcaacatgaactgg

SEQ ID NO: 196 - protein, 31 aa, Streptacidiphilus jiangxiensis
MAPALVEVGEFNEDTLGGWGTVPDWFFNMNW

SEQ ID NO: 197 - DNA, 93 bp, Streptacidiphilus jiangxiensis; identical to SEQ ID NO: 195
  CDS (1)..(93)

SEQ ID NO: 198 - protein, 31 aa, Streptacidiphilus jiangxiensis; identical to SEQ ID NO: 196

SEQ ID NO: 199 - DNA, 93 bp, Streptacidiphilus anmyonensis
  CDS (1)..(93)
atggcaccggcacttgtcgaggtcggcgagttcaatgaggacaccctcggtggctggggcaccgttccggactggttcttcaacatgaagtgg

SEQ ID NO: 200 - protein, 31 aa, Streptacidiphilus anmyonensis
MAPALVEVGEFNEDTLGGWGTVPDWFFNMKW

SEQ ID NO: 201 - DNA, 93 bp, Streptacidiphilus anmyonensis; identical to SEQ ID NO: 199
  CDS (1)..(93)

SEQ ID NO: 202 - protein, 31 aa, Streptacidiphilus anmyonensis; identical to SEQ ID NO: 200

SEQ ID NO: 203 - DNA, 114 bp, Caulobacter sp.
  CDS (1)..(114)
atgaatacgctcaagacccggctgatccgtttcggctcggccaagcgcctgacccgcgccggcaccggggtgcttctcccggaaaccaaccagatcaagcggtacgacccggcc

SEQ ID NO: 204 - protein, 38 aa, Caulobacter sp.
MNTLKTRLIRFGSAKRLTRAGTGVLLPETNQIKRYDPA

SEQ ID NO: 205 - DNA, 108 bp, Caulobacter sp.
  CDS (1)..(108)
atgacgactcccaagtttcgactgatccgtctgggttcggccaagcgcctgacccgctcggggatcggggacgtgttccccgagcccaacatggttcgccgttgggac

SEQ ID NO: 206 - protein, 36 aa, Caulobacter sp.
MTTPKFRLIRLGSAKRLTRSGIGDVFPEPNMVRRWD

SEQ ID NO: 207 - DNA, 117 bp, Sphingobium barthaii
  CDS (1)..(117)
atggaacgtgacaatgacgtgatcgaactcggcgcggtcagcgtggaaaccaaggggcccggcggcatcaccggcgatgtcgggcttggtgaaaataatttcggcctttccgacgac

SEQ ID NO: 208 - protein, 39 aa, Sphingobium barthaii
MERDNDVIELGAVSVETKGPGGITGDVGLGENNFGLSDD

SEQ ID NO: 209 - DNA, 117 bp, Sphingobium barthaii; identical to SEQ ID NO: 207
  CDS (1)..(117)

SEQ ID NO: 210 - protein, 39 aa, Sphingobium barthaii; identical to SEQ ID NO: 208

SEQ ID NO: 211 - DNA, 117 bp, Sphingobium chlorophenolicum
  CDS (1)..(117)
atggaacgcgaatatggcgtgatcgaactcggcgccgtcagcgtcgagaccaagggtttgggcggaccgaccggcgatgttggtatcggcgaacagccggccggcctgtccgacgac

SEQ ID NO: 212 - protein, 39 aa, Sphingobium chlorophenolicum
MEREYGVIELGAVSVETKGLGGPTGDVGIGEQPAGLSDD

SEQ ID NO: 213 - DNA, 117 bp, Sphingobium chlorophenolicum
  CDS (1)..(117)
atggaacgcaaggaagatgtgatcgatctcggcgccgccagcattgaaacaaagggcatgggcggcctgcgcgaagatcttgcgatcggcgaaccctttaccggtcttgccgacgat

SEQ ID NO: 214 - protein, 39 aa, Sphingobium chlorophenolicum
MERKEDVIDLGAASIETKGMGGLREDLAIGEPFTGLADD

SEQ ID NO: 215 - DNA, 117 bp, Sphingobium xenophagum
  CDS (1)..(117)
atggaacgcgaagacactctgatcgacctcgggaccgcaagcatcgagaccaagggaccgggcggcatcgccggcgatgtcggcctgaaccaggaactcaccggcctgtcggacgat

SEQ ID NO: 216 - protein, 39 aa, Sphingobium xenophagum
MEREDTLIDLGTASIETKGPGGIAGDVGLNQELTGLSDD

SEQ ID NO: 217 - DNA, 117 bp, Sphingobium xenophagum; identical to SEQ ID NO: 215
  CDS (1)..(117)

SEQ ID NO: 218 - protein, 39 aa, Sphingobium xenophagum; identical to SEQ ID NO: 216

SEQ ID NO: 219 - DNA, 117 bp, Sphingobium barthaii; identical to SEQ ID NO: 207
  CDS (1)..(117)

SEQ ID NO: 220 - protein, 39 aa, Sphingobium barthaii; identical to SEQ ID NO: 208

SEQ ID NO: 221 - DNA, 99 bp, Burkholderia rhizoxinica
  CDS (1)..(99)
atggagctgtgcgcgtcgtcagagacgctgggcggtgcgggacagtacaaggaagtggaagctggccgctggagtgatcgcattgactccgacgacgaa

SEQ ID NO: 222 - protein, 33 aa, Burkholderia rhizoxinica
MELCASSETLGGAGQYKEVEAGRWSDRIDSDDE

SEQ ID NO: 223 - DNA, 123 bp, Burkholderia rhizoxinica
  CDS (1)..(123)
  misc_feature (16)..(18): The codon at these positions can code for Val or Leu
atgcatcaggaagcaktggacctcttgttggatgatgagtcgctgatggagctgtgtgcttccgaatcgactctaggcggttcagggaaatataaggaagctggcgttggccgcttcctagat

SEQ ID NO: 224 - protein, 41 aa, Burkholderia rhizoxinica
  MOD_RES (6)..(6): Val or Leu
MHQEAXDLLLDDESLMELCASESTLGGSGKYKEAGVGRFLD

SEQ ID NO: 225 - DNA, 132 bp, Glomeribacter sp.
  CDS (1)..(132)
atgaccaagagcaaagaactaagccaagatattcaattggaagaaaccctaatggaattttgtgcttctgaagcaaccatgggcgcggtaggagagaagaacgaagccggctttggtaaatacgatgacgtg

SEQ ID NO: 226 - protein, 44 aa, Glomeribacter sp.
MTKSKELSQDIQLEETLMEFCASEATMGAVGEKNEAGFGKYDDV

SEQ ID NO: 227 - DNA, 132 bp, Glomeribacter sp.; identical to SEQ ID NO: 225
  CDS (1)..(132)

SEQ ID NO: 228 - protein, 44 aa, Glomeribacter sp.; identical to SEQ ID NO: 226

SEQ ID NO: 229 - DNA, 129 bp, Glomeribacter sp.
  CDS (1)..(129)
atgattaagaatcaagagctcaatcaagatatccagttagatgatgaagcgctgacgcaattttgcgcttctgaagcaaccatgggtggttcagggcaatataaagaagcgggcgttggccgattccta

SEQ ID NO: 230 - protein, 43 aa, Glomeribacter sp.
MIKNQELNQDIQLDDEALTQFCASEATMGGSGQYKEAGVGRFL

SEQ ID NO: 231 - DNA, 132 bp, Glomeribacter sp.
  CDS (1)..(132)
atgaccaatagcaaagaaattaaaatacaagagactcaattgcaagacgaaactctgagcgagttttgtgcctccaaagcaactatgggcggttcaggacaatatagagaagcaggcgttggccggttccta

SEQ ID NO: 232 - protein, 44 aa, Glomeribacter sp.
MTNSKEIKIQETQLQDETLSEFCASKATMGGSGQYREAGVGRFL

SEQ ID NO: 233 - DNA, 129 bp, Glomeribacter sp.
  CDS (1)..(129)
atgattaagaatcaagagctcaatcaagatatccagttagatgatgaagtgctgacgcaattttgtgcttctgaagcaaccatgggtggctcaggaaaatataaagaagcgggtgttggccgattccta

SEQ ID NO: 234 - protein, 43 aa, Glomeribacter sp.
MIKNQELNQDIQLDDEVLTQFCASEATMGGSGKYKEAGVGRFL

SEQ ID NO: 235 - DNA, 126 bp, Streptomyces scabrisporus
  CDS (1)..(126)
atgacgtacgacgacagctacgggcctccgacgctggtcgaggtcggcgacttcaccgaactgaccctcggcctctggtgggggtgcccgcaggacgtcttcggcggcctgacgccgctcgcctgc

SEQ ID NO: 236 - protein, 42 aa, Streptomyces scabrisporus
MTYDDSYGPPTLVEVGDFTELTLGLWWGCPQDVFGGLTPLAC

SEQ ID NO: 237 - DNA, 129 bp, Streptomyces roseosporus
  CDS (1)..(129)
atgaagcagcagaagcagcagaagaaggcttacgtgaagccgtcgatgttccagcagggcgacttctcgaagaaaaccgccggctacttcgtcggctcgtacaaggagtactggagccggcggatcatc

SEQ ID NO: 238 - protein, 43 aa, Streptomyces roseosporus
MKQQKQQKKAYVKPSMFQQGDFSKKTAGYFVGSYKEYWSRRII

SEQ ID NO: 239 - DNA, 129 bp, Streptomyces roseosporus; identical to SEQ ID NO: 237
  CDS (1)..(129)

SEQ ID NO: 240 - protein, 43 aa, Streptomyces roseosporus; identical to SEQ ID NO: 238

SEQ ID NO: 241 - DNA, 129 bp, Streptomyces roseosporus; identical to SEQ ID NO: 237
  CDS (1)..(129)

SEQ ID NO: 242 - protein, 43 aa, Streptomyces roseosporus; identical to SEQ ID NO: 238

SEQ ID NO: 243 - DNA, 129 bp, Streptomyces roseosporus; identical to SEQ ID NO: 237
  CDS (1)..(129)

SEQ ID NO: 244 - protein, 43 aa, Streptomyces roseosporus; identical to SEQ ID NO: 238

SEQ ID NO: 245 - DNA, 129 bp, Streptomyces griseus
  CDS (1)..(129)
atgaagcagcagaagcagcagaagaaggcttacgtgaagccgtcgatgttccagcagggcgacttctcgaagaagaccgccggctacttcgtcggctcgtacaaggagtactggacccggcgcatcgtc

SEQ ID NO: 246 - protein, 43 aa, Streptomyces griseus
MKQQKQQKKAYVKPSMFQQGDFSKKTAGYFVGSYKEYWTRRIV

SEQ ID NO: 247 - DNA, 129 bp, Streptomyces griseus; identical to SEQ ID NO: 245
  CDS (1)..(129)

SEQ ID NO: 248 - protein, 43 aa, Streptomyces griseus; identical to SEQ ID NO: 246

SEQ ID NO: 249 - DNA, 129 bp, Streptomyces griseus
  CDS (1)..(129)
atgaagcagcagaagcagcagaagaaggcttacgtgaagccgtcgatgttccagcagggcgacttctcgaagaagaccgccggctacttcgtcggctcgtacaaggagtactggacccggcgcatcatc

SEQ ID NO: 250 - protein, 43 aa, Streptomyces griseus
MKQQKQQKKAYVKPSMFQQGDFSKKTAGYFVGSYKEYWTRRII

SEQ ID NO: 251 - DNA, 129 bp, Streptomyces griseus; identical to SEQ ID NO: 245
  CDS (1)..(129)

SEQ ID NO: 252 - protein, 43 aa, Streptomyces griseus; identical to SEQ ID NO: 246

SEQ ID NO: 253 - DNA, 129 bp, Streptomyces griseus; identical to SEQ ID NO: 249
  CDS (1)..(129)

SEQ ID NO: 254 - protein, 43 aa, Streptomyces griseus; identical to SEQ ID NO: 250

SEQ ID NO: 255 - DNA, 129 bp, Streptomyces griseus; identical to SEQ ID NO: 249
  CDS (1)..(129)

SEQ ID NO: 256 - protein, 43 aa, Streptomyces griseus; identical to SEQ ID NO: 250

SEQ ID NO: 257 - DNA, 129 bp, Streptomyces griseus; identical to SEQ ID NO: 249
  CDS (1)..(129)

SEQ ID NO: 258 - protein, 43 aa, Streptomyces griseus; identical to SEQ ID NO: 250

SEQ ID NO: 259 - DNA, 129 bp, Streptomyces globisporus
  CDS (1)..(129)
atgaagcagcagaagcagcagaagaaggcttacgtgaagccgtcgatgcaccagcagggcgacttctcgaagaagaccgccggctacttcgtcggctcgtacaaggagtactggacccggcgcatcatc

SEQ ID NO: 260 - protein, 43 aa, Streptomyces globisporus
MKQQKQQKKAYVKPSMHQQGDFSKKTAGYFVGSYKEYWTRRII

SEQ ID NO: 261 - DNA, 120 bp, Streptomyces albus
  CDS (1)..(120)
atgaagcagcagaagaaggcttacgtgaagccgtcgctgttcaagcagggcgacttttcgaagaagaccgccggttacttctacggctcgtacaaggagtactgggtccgccgcatcatc

SEQ ID NO: 262 - protein, 40 aa, Streptomyces albus
MKQQKKAYVKPSLFKQGDFSKKTAGYFYGSYKEYWVRRII

SEQ ID NO: 263 - DNA, 120 bp, Streptomyces albus; identical to SEQ ID NO: 261
  CDS (1)..(120)

SEQ ID NO: 264 - protein, 40 aa, Streptomyces albus; identical to SEQ ID NO: 262

SEQ ID NO: 265 - DNA, 120 bp, Streptomyces albus; identical to SEQ ID NO: 261
  CDS (1)..(120)

SEQ ID NO: 266 - protein, 40 aa, Streptomyces albus; identical to SEQ ID NO: 262

SEQ ID NO: 267 - DNA, 120 bp, Streptomyces albus; identical to SEQ ID NO: 261
  CDS (1)..(120)

SEQ ID NO: 268 - protein, 40 aa, Streptomyces albus; identical to SEQ ID NO: 262

SEQ ID NO: 269 - DNA, 120 bp, Streptomyces albus; identical to SEQ ID NO: 261
  CDS (1)..(120)

SEQ ID NO: 270 - protein, 40 aa, Streptomyces albus; identical to SEQ ID NO: 262

SEQ ID NO: 271 - DNA, 120 bp, Streptomyces albus; identical to SEQ ID NO: 261
  CDS (1)..(120)

SEQ ID NO: 272 - protein, 40 aa, Streptomyces albus; identical to SEQ ID NO: 262

SEQ ID NO: 273 - DNA, 120 bp, Streptomyces albus; identical to SEQ ID NO: 261
  CDS (1)..(120)

SEQ ID NO: 274 - protein, 40 aa, Streptomyces albus; identical to SEQ ID NO: 262

SEQ ID NO: 275 - DNA, 120 bp, Streptomyces albus; identical to SEQ ID NO: 261
  CDS (1)..(120)

SEQ ID NO: 276 - protein, 40 aa, Streptomyces albus; identical to SEQ ID NO: 262

SEQ ID NO: 277 - DNA, 120 bp, Streptomyces albus; identical to SEQ ID NO: 261
  CDS (1)..(120)

SEQ ID NO: 278 - protein, 40 aa, Streptomyces albus; identical to SEQ ID NO: 262

SEQ ID NO: 279 - DNA, 120 bp, Streptomyces albus; identical to SEQ ID NO: 261
  CDS (1)..(120)

SEQ ID NO: 280 - protein, 40 aa, Streptomyces albus; identical to SEQ ID NO: 262

SEQ ID NO: 281 - DNA, 120 bp, Streptomyces albus; identical to SEQ ID NO: 261
  CDS (1)..(120)

SEQ ID NO: 282 - protein, 40 aa, Streptomyces albus; identical to SEQ ID NO: 262

SEQ ID NO: 283 - DNA, 120 bp, Streptomyces albus; identical to SEQ ID NO: 261
  CDS (1)..(120)

SEQ ID NO: 284 - protein, 40 aa, Streptomyces albus; identical to SEQ ID NO: 262

SEQ ID NO: 285 - DNA, 120 bp, Streptomyces sp.
  CDS (1)..(120)
atgaagctgcggaagaaggcttacgtgaagccgtcgctgttcaagcagggcgacttttcgaagaagaccgccggttacttctacggctcgtacaaggagtactgggtccgtcgcatcagc

SEQ ID NO: 286 - protein, 40 aa, Streptomyces sp.
MKLRKKAYVKPSLFKQGDFSKKTAGYFYGSYKEYWVRRIS

SEQ ID NO: 287 - DNA, 120 bp, Streptomyces albus; identical to SEQ ID NO: 261
  CDS (1)..(120)

SEQ ID NO: 288 - protein, 40 aa, Streptomyces albus; identical to SEQ ID NO: 262

SEQ ID NO: 289 - DNA, 120 bp, Streptomyces albus; identical to SEQ ID NO: 261
  CDS (1)..(120)

SEQ ID NO: 290 - protein, 40 aa, Streptomyces albus; identical to SEQ ID NO: 262

SEQ ID NO: 291 - DNA, 120 bp, Streptomyces albus; identical to SEQ ID NO: 261
  CDS (1)..(120)

SEQ ID NO: 292 - protein, 40 aa, Streptomyces albus; identical to SEQ ID NO: 262

SEQ ID NO: 293 - DNA, 120 bp, Streptomyces albus; identical to SEQ ID NO: 261
  CDS (1)..(120)

SEQ ID NO: 294 - protein, 40 aa, Streptomyces albus; identical to SEQ ID NO: 262

SEQ ID NO: 295 - DNA, 120 bp, Streptomyces anulatus
  CDS (1)..(120)
atgaagctgcagaagaaggcttatgtgaagccgtcgctgttcaagcagggcgacttttcgaagaagaccgccggctacttcgtcggctcgtacaaggagtactggacccggcgcatcgtc

SEQ ID NO: 296 - protein, 40 aa, Streptomyces anulatus
MKLQKKAYVKPSLFKQGDFSKKTAGYFVGSYKEYWTRRIV

SEQ ID NO: 297 - DNA, 123 bp, Streptomyces alboviridis
  CDS (1)..(123)
atgaagctgcagaagaaggcttacgtgaagccgtcgctgttcaagcagggcgacttctcgaagaagaccgccggttacttcgtcggctcgtacaaggagtactgggttcggcgcatcgtctac

SEQ ID NO: 298 - protein, 41 aa, Streptomyces alboviridis
MKLQKKAYVKPSLFKQGDFSKKTAGYFVGSYKEYWVRRIVY

SEQ ID NO: 299 - DNA, 123 bp, Streptomyces alboviridis; identical to SEQ ID NO: 297
  CDS (1)..(123)

SEQ ID NO: 300 - protein, 41 aa, Streptomyces alboviridis; identical to SEQ ID NO: 298

SEQ ID NO: 301 - DNA, 123 bp, Streptomyces alboviridis; identical to SEQ ID NO: 297
  CDS (1)..(123)

SEQ ID NO: 302 - protein, 41 aa, Streptomyces alboviridis; identical to SEQ ID NO: 298

SEQ ID NO: 303 - DNA, 123 bp, Streptomyces luridiscabiei
  CDS (1)..(123)
atgaagccgcagaagaaggcttacgtgaagccgtcgctgttcaagcagggcgacttctcgaagaagaccgccggttacttcgtcggctcgtacaaggagtactgggtccggcgcatcgtctac

SEQ ID NO: 304 - protein, 41 aa, Streptomyces luridiscabiei
MKPQKKAYVKPSLFKQGDFSKKTAGYFVGSYKEYWVRRIVY

SEQ ID NO: 305 - DNA, 96 bp, Streptomyces sp.
  CDS (1)..(96)
atgaagccgtcgctgttcaagcagggcgacttttcgaagaagaccgccggttacttctacggctcgtacaaggagtactgggtccggcgcatcatc

SEQ ID NO: 306 - protein, 32 aa, Streptomyces sp.
MKPSLFKQGDFSKKTAGYFYGSYKEYWVRRII

SEQ ID NO: 307 - DNA, 120 bp, Streptomyces albus; identical to SEQ ID NO: 261
  CDS (1)..(120)

SEQ ID NO: 308 - protein, 40 aa, Streptomyces albus; identical to SEQ ID NO: 262

SEQ ID NO: 309 - DNA, 168 bp, Streptomyces cyaneofuscatus
gtgcacagggagccggtcggcggatcagatgatgcgccggacccagtactccttgtacgagccgtagaagtaaccggcggtcttcttcgaaaagtcgccctgcttgaacagcgacggcttcacgtaagccttcttctgctgcttcatgacaccttccttctgtgcggt

SEQ ID NO: 310 - protein, 56 aa, Streptomyces cyaneofuscatus
MHREPVGGSDDAPDPVLLVRAVEVTGGLLRKVALLEQRRLHVSLLLLLHDTFLLCG

SEQ ID NO: 311 - DNA, 120 bp, Streptomyces albus; identical to SEQ ID NO: 261
  CDS (1)..(120)

SEQ ID NO: 312 - protein, 40 aa, Streptomyces albus; identical to SEQ ID NO: 262

SEQ ID NO: 313 - DNA, 96 bp, Streptomyces sp.; identical to SEQ ID NO: 305
  CDS (1)..(96)

SEQ ID NO: 314 - protein, 32 aa, Streptomyces sp.; identical to SEQ ID NO: 306

SEQ ID NO: 315 - DNA, 96 bp, Streptomyces sp.; identical to SEQ ID NO: 305
  CDS (1)..(96)

SEQ ID NO: 316 - protein, 32 aa, Streptomyces sp.; identical to SEQ ID NO: 306

SEQ ID NO: 317 - DNA, 129 bp, Streptomyces roseosporus; identical to SEQ ID NO: 237
  CDS (1)..(129)

SEQ ID NO: 318 - protein, 43 aa, Streptomyces roseosporus; identical to SEQ ID NO: 238

SEQ ID NO: 319 - DNA, 153 bp, Asticcacaulis excentricus
  CDS (1)..(153)
atgcatacccccattatttcggaaacggtccaaccgaagaccgctggcctcatcgttctgggcaaggcttcagctgagacccgcggtctcagccagggtgtcgagcccgatatcggccagacctacttcgaagagtctcgcatcaaccaggac

SEQ ID NO: 320 - protein, 51 aa, Asticcacaulis excentricus
MHTPIISETVQPKTAGLIVLGKASAETRGLSQGVEPDIGQTYFEESRINQD

SEQ ID NO: 321 - DNA, 153 bp, Asticcacaulis excentricus; identical to SEQ ID NO: 319
  CDS (1)..(153)

SEQ ID NO: 322 - protein, 51 aa, Asticcacaulis excentricus; identical to SEQ ID NO: 320

SEQ ID NO: 323 - DNA, 138 bp, Rhodococcus jostii
  CDS (1)..(138)
atgacctctcagccgagcaagaagacgtacaatgcaccgagcctggtgcagcgggggaagttcgcacgaaccacagcaggttctcagctggtctatcgcgagtgggtcgggcattcaaacgtcattaagcccggcccc

SEQ ID NO: 324 - protein, 46 aa, Rhodococcus jostii
MTSQPSKKTYNAPSLVQRGKFARTTAGSQLVYREWVGHSNVIKPGP

SEQ ID NO: 325 - DNA, 114 bp, Rubrivivax gelatinosus
  CDS (1)..(114)
atggacgaagagctggaactggagatcgtcgacctgggtgacgccaaggaactgacgcagggcgcgccgagcctgatcaactcggaagacaacccggccttcccgcagcgcgtc

SEQ ID NO: 326 - protein, 38 aa, Rubrivivax gelatinosus
MDEELELEIVDLGDAKELTQGAPSLINSEDNPAFPQRV

SEQ ID NO: 327 - DNA, 114 bp, Rubrivivax gelatinosus; identical to SEQ ID NO: 325
  CDS (1)..(114)

SEQ ID NO: 328 - protein, 38 aa, Rubrivivax gelatinosus; identical to SEQ ID NO: 326

SEQ ID NO: 329 - DNA, 147 bp, Xanthomonas citri
  CDS (1)..(147)
atgaaaacgttcgtcgatagcgctccgagccaggaagaccatggcaaggacatcatcgtgctcggaattgccagtgtggaaacccagggcggcgcgggagccggtgaggtgaatgggatgtcccccatcgccggcatctccgaagaa

SEQ ID NO: 330 - protein, 49 aa, Xanthomonas citri
MKTFVDSAPSQEDHGKDIIVLGIASVETQGGAGAGEVNGMSPIAGISEE

SEQ ID NO: 331 - DNA, 138 bp, Xanthomonas gardneri
  CDS (1)..(138)
atgaacagcaacgacaccacccacagcgatgcatccaacgagatcacggtgcttggcgttgccagcaccgacaccaaaggcggcccgctcgctggcgaagaaatcggcggcttcaatgtgcccggcatttccgaagag

SEQ ID NO: 332 - protein, 46 aa, Xanthomonas gardneri
MNSNDTTHSDASNEITVLGVASTDTKGGPLAGEEIGGFNVPGISEE

SEQ ID NO: 333 - DNA, 144 bp, Xanthomonas gardneri
  CDS (1)..(144)
atggataccagcaacaacgacgctcgcaccacggcgttggatcaggatctcatcgtgctaggggtcgcaagcctggacacacagggcgggccattggcaggcgaagaaatgggtggcatcaccaccctgggcatcagccaggac

SEQ ID NO: 334 - protein, 48 aa, Xanthomonas gardneri
MDTSNNDARTTALDQDLIVLGVASLDTQGGPLAGEEMGGITTLGISQD

SEQ ID NO: 335 - DNA, 138 bp, Xanthomonas hortorum
  CDS (1)..(138)
atgaacagcaacgacaccactcacagcgatgcatccagcgagatcacggtgcttggcgttgccagcaccgacaccaaaggcggcccgctcgctggcgaagaaatcggcggcttcaatgtacccggcatttccgaagag

SEQ ID NO: 336 - protein, 46 aa, Xanthomonas hortorum
MNSNDTTHSDASSEITVLGVASTDTKGGPLAGEEIGGFNVPGISEE

SEQ ID NO: 337 - DNA, 144 bp, Xanthomonas hortorum
  CDS (1)..(144)
atggataccagcaacaacgacgctcgcgccaccgcgttggatcaggatctcatcgtactcggggtcgcaagcctggacacacagggcgggccattggcaggcgaagaaatgggtggcatcaccaccctgggcatcagccaggac

SEQ ID NO: 338 - protein, 48 aa, Xanthomonas hortorum
MDTSNNDARATALDQDLIVLGVASLDTQGGPLAGEEMGGITTLGISQD

SEQ ID NO: 339 - DNA, 138 bp, Xanthomonas arboricola
  CDS (1)..(138)
atgaacatcaatgacaccacctacagcgatgcgtccagcgagatcacggtgcttggcgtcgccagcaccgataccaaaggcggcccgctggctggcgaagagatcggcggcttcaatgtgcctggcatttccgaagag

SEQ ID NO: 340 - protein, 46 aa, Xanthomonas arboricola
MNINDTTYSDASSEITVLGVASTDTKGGPLAGEEIGGFNVPGISEE

SEQ ID NO: 341 - DNA, 144 bp, Xanthomonas gardneri; identical to SEQ ID NO: 333
  CDS (1)..(144)

SEQ ID NO: 342 - protein, 48 aa, Xanthomonas gardneri; identical to SEQ ID NO: 334

SEQ ID NO: 343 - DNA, 138 bp, Xanthomonas arboricola
  CDS (1)..(138)
atgaacatcaatgacaccacccacagcgacgcatccagcgagatcacggtgcttggcgttgccagcaccgacaccaaaggcggcccgctcgctggcgaagaaatcggcggcttcaacgtgcctggcatttccgaagag

SEQ ID NO: 344 - protein, 46 aa, Xanthomonas arboricola
MNINDTTHSDASSEITVLGVASTDTKGGPLAGEEIGGFNVPGISEE

SEQ ID NO: 345 - DNA, 144 bp, Xanthomonas arboricola
  CDS (1)..(144)
atggataccagcaacaacgacgcgcataccacgacgtctggccaggatctcatcgtacttggcatcgcaagcctggacacacagggcgggccattggcaggcgaagaaatgggcggcatcaccacgctgggcatcagccaggac

SEQ ID NO: 346 - protein, 48 aa, Xanthomonas arboricola
MDTSNNDAHTTTSGQDLIVLGIASLDTQGGPLAGEEMGGITTLGISQD

SEQ ID NO: 347 - DNA, 138 bp, Xanthomonas cannabis
  CDS (1)..(138)
atgaacatcaatgacaccacccacaccgatgcatccagcgagatcacggtgcttggcgttgccagcaccgacaccaagggcggcccgctcgctggcgaagaaatcggcggcttcaatgtgccgggcatttccgaagag

SEQ ID NO: 348 - protein, 46 aa, Xanthomonas cannabis
MNINDTTHTDASSEITVLGVASTDTKGGPLAGEEIGGFNVPGISEE

SEQ ID NO: 349 - DNA, 144 bp, Xanthomonas cannabis
  CDS (1)..(144)
atggataccagcaacaacgacgcgcataccacgacgtctggccaggatctcatcgtgcttggcatcgcaagcctggacacacagggcgggccactcgcaggcgaagaaatgggcggcatcaccgcgctgggcatcagccaggac

SEQ ID NO: 350 - protein, 48 aa, Xanthomonas cannabis
MDTSNNDAHTTTSGQDLIVLGIASLDTQGGPLAGEEMGGITALGISQD

SEQ ID NO: 351 - DNA, 135 bp, Xanthomonas arboricola
  CDS (1)..(135)
atgaacatcaatgacaccacccacagcgattccagcgagatcacggtgcttggcgttgccagcaccgataccaaaggcggcccgctcgctggcgaagaaatcggcggcttcaacgtgcctggcatttccgaagag

SEQ ID NO: 352 - protein, 45 aa, Xanthomonas arboricola
MNINDTTHSDSSEITVLGVASTDTKGGPLAGEEIGGFNVPGISEE

SEQ ID NO: 353 - DNA, 144 bp, Xanthomonas campestris
  CDS (1)..(144)
atggataccagcaacaacgacgcgcacaccacgacgtttggtcaggatctcatcgtgcttgggatcgcaagcctggacacgcagggcgggccactggcaggcgaagaaatgggtggcatcaccacgctgggcatcagccaggac

SEQ ID NO: 354 - protein, 48 aa, Xanthomonas campestris
MDTSNNDAHTTTFGQDLIVLGIASLDTQGGPLAGEEMGGITTLGISQD

SEQ ID NO: 355 - DNA, 138 bp, Xanthomonas arboricola; identical to SEQ ID NO: 343
  CDS (1)..(138)

SEQ ID NO: 356 - protein, 46 aa, Xanthomonas arboricola; identical to SEQ ID NO: 344

SEQ ID NO: 357 - DNA, 144 bp, Xanthomonas campestris
  CDS (1)..(144)
atggataccagcaacaacgacgcgcacaccacgacgtttggtcaggatctcatcgtgcttgggatcgcaagcctggacacacagggcgggccattggcaggcgaagaaatgggtggcatcaccacgctgggcatcagccacgac

SEQ ID NO: 358 - protein, 48 aa, Xanthomonas campestris
MDTSNNDAHTTTFGQDLIVLGIASLDTQGGPLAGEEMGGITTLGISHD

SEQ ID NO: 359 - DNA, 138 bp, Xanthomonas cannabis; identical to SEQ ID NO: 347
  CDS (1)..(138)

SEQ ID NO: 360 - protein, 46 aa, Xanthomonas cannabis; identical to SEQ ID NO: 348

SEQ ID NO: 361 - DNA, 144 bp, Xanthomonas cannabis; identical to SEQ ID NO: 349
  CDS (1)..(144)

SEQ ID NO: 362 - protein, 48 aa, Xanthomonas cannabis; identical to SEQ ID NO: 350

SEQ ID NO: 363 - DNA, 138 bp, Xanthomonas arboricola; identical to SEQ ID NO: 343
  CDS (1)..(138)

SEQ ID NO: 364 - protein, 46 aa, Xanthomonas arboricola; identical to SEQ ID NO: 344

SEQ ID NO: 365 - DNA, 144 bp, Xanthomonas arboricola
  CDS (1)..(144)
atggataccagcaacaacgacgcgcacaccacgacgtttggtcaggatctcatcgtgcttgggatcgcaagcctggacacgcagggcgggccactggcaggcgaagaaatgggtggcagcaccacgctgggcatcagccaggac

SEQ ID NO: 366 - protein, 48 aa, Xanthomonas arboricola
MDTSNNDAHTTTFGQDLIVLGIASLDTQGGPLAGEEMGGSTTLGISQD

SEQ ID NO: 367 - DNA, 138 bp, Xanthomonas arboricola; identical to SEQ ID NO: 343
  CDS (1)..(138)

SEQ ID NO: 368 - protein, 46 aa, Xanthomonas arboricola; identical to SEQ ID NO: 344

SEQ ID NO: 369 - DNA, 144 bp, Xanthomonas arboricola; identical to SEQ ID NO: 365
  CDS (1)..(144)

SEQ ID NO: 370 - protein, 48 aa, Xanthomonas arboricola; identical to SEQ ID NO: 366

SEQ ID NO: 371 - DNA, 138 bp, Xanthomonas arboricola; identical to SEQ ID NO: 343
  CDS (1)..(138)

SEQ ID NO: 372 - protein, 46 aa, Xanthomonas arboricola; identical to SEQ ID NO: 344

SEQ ID NO: 373 - DNA, 144 bp, Xanthomonas arboricola; identical to SEQ ID NO: 365
  CDS (1)..(144)

SEQ ID NO: 374 - protein, 48 aa, Xanthomonas arboricola; identical to SEQ ID NO: 366

SEQ ID NO: 375 - DNA, 138 bp, Xanthomonas arboricola
  CDS (1)..(138)
atgaacatcaatgacaccacctacaacgatgcatccagcgagatcacggtgcttggcgttgccagcaccgacaccaaaggcggcccgctcgctggcgaagaaatcggcggcttcaacgtgcctggcatttccgaagag

SEQ ID NO: 376 - protein, 46 aa, Xanthomonas arboricola
MNINDTTYNDASSEITVLGVASTDTKGGPLAGEEIGGFNVPGISEE

SEQ ID NO: 377 - DNA, 144 bp, Xanthomonas arboricola; identical to SEQ ID NO: 365
  CDS (1)..(144)

SEQ ID NO: 378 - protein, 48 aa, Xanthomonas arboricola; identical to SEQ ID NO: 366

SEQ ID NO: 379 - DNA, 138 bp, Xanthomonas arboricola; identical to SEQ ID NO: 343
  CDS (1)..(138)

SEQ ID NO: 380 - protein, 46 aa, Xanthomonas arboricola; identical to SEQ ID NO: 344

SEQ ID NO: 381 - DNA, 144 bp, Xanthomonas arboricola; identical to SEQ ID NO: 365
  CDS (1)..(144)

SEQ ID NO: 382 - protein, 48 aa, Xanthomonas arboricola; identical to SEQ ID NO: 366

SEQ ID NO: 383 - DNA, 138 bp, Xanthomonas arboricola; identical to SEQ ID NO: 343
  CDS (1)..(138)

SEQ ID NO: 384 - protein, 46 aa, Xanthomonas arboricola; identical to SEQ ID NO: 344

SEQ ID NO: 385 - DNA, 144 bp, Xanthomonas campestris; identical to SEQ ID NO: 353
  CDS (1)..(144)

SEQ ID NO: 386 - protein, 48 aa, Xanthomonas campestris; identical to SEQ ID NO: 354

SEQ ID NO: 387 - DNA, 138 bp, Xanthomonas sp.
  CDS (1)..(138)
atgaacacgaacgacaacaacagccgcaatccgcaggccgacgtgatcgaagtcggcatcgcaagcctcgacactgccggccccgccgttttcggcgaggaaatcggtggtctcgccagccccggaatctccgaggac

SEQ ID NO: 388 - protein, 46 aa, Xanthomonas sp.
MNTNDNNSRNPQADVIEVGIASLDTAGPAVFGEEIGGLASPGISED

SEQ ID NO: 389 - DNA, 147 bp, Xanthomonas sp.
  CDS (1)..(147)
atggataacaacgcaaccacctcagtcagcgatctgactgccggcgtggacgtgcacgtacttggcatcgcaagtgtcgatacgcacggcgtccgcaacaccggcgaagacatgggcggcatcacaaccgccggcatctccgacgac

SEQ ID NO: 390 - protein, 49 aa, Xanthomonas sp.
MDNNATTSVSDLTAGVDVHVLGIASVDTHGVRNTGEDMGGITTAGISDD

SEQ ID NO: 391 - DNA, 132 bp, Sphingobium yanoikuyae
  CDS (1)..(132)
atggaacgcaacagcgaagaccgccgtgacgacgtcgtcgaactcggcgcggtgagcgtcgaaaccaagggcatctccggtggaacggtcgatgcgcctgccggccagggccttgccggtatcctcgacgac

SEQ ID NO: 392 - protein, 44 aa, Sphingobium yanoikuyae
MERNSEDRRDDVVELGAVSVETKGISGGTVDAPAGQGLAGILDD

SEQ ID NO: 393 - DNA, 132 bp, Sphingobium yanoikuyae; identical to SEQ ID NO: 391
  CDS (1)..(132)

SEQ ID NO: 394 - protein, 44 aa, Sphingobium yanoikuyae; identical to SEQ ID NO: 392

SEQ ID NO: 395 - DNA, 132 bp, Sphingobium yanoikuyae; identical to SEQ ID NO: 391
  CDS (1)..(132)

SEQ ID NO: 396 - protein, 44 aa, Sphingobium yanoikuyae; identical to SEQ ID NO: 392

SEQ ID NO: 397 - DNA, 132 bp, Novosphingobium sp.
  CDS (1)..(132)
atggaacgcaccagcgaagaccgccgtgacgacgtcgtcgaactcggcgcggtgagcgtcgaaaccaagggcatcgtcggcaaccccgtcgatgcgcccgcaggccaaggccttgccggcatcctcgacgac

SEQ ID NO: 398 - protein, 44 aa, Novosphingobium sp.
MERTSEDRRDDVVELGAVSVETKGIVGNPVDAPAGQGLAGILDD

SEQ ID NO: 399 - DNA, 132 bp, Sphingopyxis alaskensis
  CDS (1)..(132)
atgaaagacttcaacgaactgatcgacctcggcgccatcagcgtcgaaacccgcggtatcgagccgctcggaccggtcgacgaggatcagggcgaacattatctgttcgccggcggcatcacggccgacgac

SEQ ID NO: 400 - protein, 44 aa, Sphingopyxis alaskensis
MKDFNELIDLGAISVETRGIEPLGPVDEDQGEHYLFAGGITADD

SEQ ID NO: 401 - DNA, 141 bp, Sphingopyxis alaskensis
  CDS (1)..(141)
atggaagacagagacgccaagttggagcttttggaccttggtgcgattagtgcgcagacgcgcggtttggaaccggtcggccccgtcgaggaagacaccggctcgcgctacatacccttcgcaggaatcggcgaatacgat

SEQ ID NO: 402 - protein, 47 aa, Sphingopyxis alaskensis
MEDRDAKLELLDLGAISAQTRGLEPVGPVEEDTGSRYIPFAGIGEYD

SEQ ID NO: 403 - DNA, 132 bp, Sphingopyxis alaskensis; identical to SEQ ID NO: 399
  CDS (1)..(132)

SEQ ID NO: 404 - protein, 44 aa, Sphingopyxis alaskensis; identical to SEQ ID NO: 400

SEQ ID NO: 405 - DNA, 141 bp, Sphingopyxis alaskensis; identical to SEQ ID NO: 401
  CDS (1)..(141)

SEQ ID NO: 406 - protein, 47 aa, Sphingopyxis alaskensis; identical to SEQ ID NO: 402

SEQ ID NO: 407 - DNA, 141 bp, Sphingopyxis sp.
  CDS (1)..(141)
atgaagaatctgcagaacagcgacgagctgatcgaactcggcgcgatcagcgtcgaaacccgcggcatcgaacccgtgggtccgcgggacgaggacacgaaccagcactatctgttcgtcggcggcatcacgaccgacgac

SEQ ID NO: 408 - protein, 47 aa, Sphingopyxis sp.
MKNLQNSDELIELGAISVETRGIEPVGPRDEDTNQHYLFVGGITTDD

SEQ ID NO: 409 - DNA, 141 bp, Novosphingobium resinovorum
  CDS (1)..(141)
atgaaaaatctgcagaacagcgacgaggccatcgaactcggcgcgatcagctgcgaaacccgcggcatcgatcccgtcggtccgcgcgacgaggcaaccggtgagcatttcctgctcagcggcggcatcacgaccgacgac

SEQ ID NO: 410 - protein, 47 aa, Novosphingobium resinovorum
MKNLQNSDEAIELGAISCETRGIDPVGPRDEATGEHFLLSGGITTDD

SEQ ID NO: 411 - DNA, 114 bp, Sphingopyxis sp.
  CDS (1)..(114)
atgattgatctcggtgccatcagcgtcgagacacgcggcatcaagcaactcggcgagcccgatttcgaagatggcgatcattacggcctcgtcggcgcaatcagcaccgacgat

SEQ ID NO: 412 - protein, 38 aa, Sphingopyxis sp.
MIDLGAISVETRGIKQLGEPDFEDGDHYGLVGAISTDD

SEQ ID NO: 413 - DNA, 114 bp, Sphingopyxis sp.; identical to SEQ ID NO: 411
  CDS (1)..(114)

SEQ ID NO: 414 - protein, 38 aa, Sphingopyxis sp.; identical to SEQ ID NO: 412

SEQ ID NO: 415 - DNA, 114 bp, Sphingopyxis sp.; identical to SEQ ID NO: 411
  CDS (1)..(114)

SEQ ID NO: 416 - protein, 38 aa, Sphingopyxis sp.; identical to SEQ ID NO: 412

SEQ ID NO: 417 - DNA, 141 bp, Sphingopyxis sp.; identical to SEQ ID NO: 407
  CDS (1)..(141)

SEQ ID NO: 418 - protein, 47 aa, Sphingopyxis sp.; identical to SEQ ID NO: 408

SEQ ID NO: 419 - DNA, 138 bp, Sphingopyxis macrogoltabida
  CDS (1)..(138)
atgaaacagcaggacagcagtgacctgatcgacctcggcgccgtcggcgtcgagacccgaggcatcgaaccggtcggtccccgcgatgaagataccaacgagcacttcctgctcgtcggcggcatcaccgctgaagac

SEQ ID NO: 420 - protein, 46 aa, Sphingopyxis macrogoltabida
MKQQDSSDLIDLGAVGVETRGIEPVGPRDEDTNEHFLLVGGITAED

SEQ ID NO: 421 - DNA, 144 bp, Sphingopyxis sp.
  CDS (1)..(144)
atgaagactttgcagcacagcgatgaactgatcgacctgggtgcaatcagcaccgaaacccgtggcctcgaaccgatcggcaagcccgacgtcgagcagggtgaccactatccgttcggcggcggcgccatcagcgccgacgat

SEQ ID NO: 422 - protein, 48 aa, Sphingopyxis sp.
MKTLQHSDELIDLGAISTETRGLEPIGKPDVEQGDHYPFGGGAISADD

SEQ ID NO: 423 - DNA, 99 bp, Sphingopyxis sp.
  CDS (1)..(99)
atggtcgaccttggcgcgatcagcaccgaaactcgcggtgccgagcccctcggcataccggaggcagaattgggcaattatgacatcggcgccgacgac

SEQ ID NO: 424 - protein, 33 aa, Sphingopyxis sp.
MVDLGAISTETRGAEPLGIPEAELGNYDIGADD

SEQ ID NO: 425 - DNA, 132 bp, Sphingopyxis alaskensis
  CDS (1)..(132)
atggaacgcaccgaagtaatcgaggaggtcatcgacctgggcaaggcgtcggtcgaaaccaagggcgaggcgctgatcgatcaggatgtcggcggcggccggcagcagttcctcaccggaatcgcgcaggac

SEQ ID NO: 426 - protein, 44 aa, Sphingopyxis alaskensis
MERTEVIEEVIDLGKASVETKGEALIDQDVGGGRQQFLTGIAQD

SEQ ID NO: 427 - DNA, 132 bp, Sphingopyxis alaskensis; identical to SEQ ID NO: 425
  CDS (1)..(132)

SEQ ID NO: 428 - protein, 44 aa, Sphingopyxis alaskensis; identical to SEQ ID NO: 426

SEQ ID NO: 429 - DNA, 132 bp, Caulobacter sp.
  CDS (1)..(132)
atggaacggatcgaagaccacatcgacgacgaactgatcgacctgggcgcggcgagcgtcgagacccagggcgacgtgctgaacgcgccggagccgggcatcggccgggagcccacgggcctgtcccgggac

SEQ ID NO: 430 - protein, 44 aa, Caulobacter sp.
MERIEDHIDDELIDLGAASVETQGDVLNAPEPGIGREPTGLSRD

SEQ ID NO: 431 - DNA, 132 bp, Caulobacter sp.
  CDS (1)..(132)
atgcaacggatcatcgacgagaccacggacggtctgatcgagctgggcgctgcaagcgtgcagacccagggcgatgtcctcttcgcgcccgagccgggcgtcggccgcccgcccatgggcctgtcggaagac

SEQ ID NO: 432 - protein, 44 aa, Caulobacter sp.
MQRIIDETTDGLIELGAASVQTQGDVLFAPEPGVGRPPMGLSED

SEQ ID NO: 433 - DNA, 132 bp, Caulobacter sp.
  CDS (1)..(132)
atggaatttgaaggcatcccttccccggacgcgcggatcgatctcggcttagcgagtgaagaaacctgcggccaaatctacgatcaccccgaagtgggcatcggcgcttatggttgcgaaggattgcagcgg

SEQ ID NO: 434 - protein, 44 aa, Caulobacter sp.
MEFEGIPSPDARIDLGLASEETCGQIYDHPEVGIGAYGCEGLQR

SEQ ID NO: 435 - DNA, 96 bp, Phenylobacterium zucineum
  CDS (1)..(96)
atgagcgttcggctgctgggcttcggcagcgccaaggccgcgaccaacggcggcatcggcggtgacttcgaagacctgaacaagccgttcgacgtc

SEQ ID NO: 436 - protein, 32 aa, Phenylobacterium zucineum
MSVRLLGFGSAKAATNGGIGGDFEDLNKPFDV

SEQ ID NO: 437 - DNA, 111 bp, Caulobacter segnis
gtgaccaagacccatcgcctgatccgcctgggcgacgcccagcgtctgacccaaggcacgctcactccgggcctgccggaggatttcctgcctggccactacatgccgggc

SEQ ID NO: 438 - protein, 37 aa, Caulobacter segnis
MTKTHRLIRLGDAQRLTQGTLTPGLPEDFLPGHYMPG

SEQ ID NO: 439 - DNA, 111 bp, Caulobacter segnis
  CDS (1)..(111)
atgacgtctaggtttcaactgctgcgattgggcaaggccgacaggctgacgcggggcgcgctggtgggcctgctgctcgaggacatcaccgtggcccgctacgacccgatg

SEQ ID NO: 440 - protein, 37 aa, Caulobacter segnis
MTSRFQLLRLGKADRLTRGALVGLLLEDITVARYDPM

SEQ ID NO: 441 - DNA, 126 bp, Caulobacter segnis
  CDS (1)..(126)
atgaccaagaagaacgccacccaagccccgcgtctcgtgcgcgtcggcgacgcccatcgcctgacgcaaggcgcgttcgtcggccagcccgaagcggtcaatccgctcggccgcgaaatccaaggc

SEQ ID NO: 442 - protein, 42 aa, Caulobacter segnis
MTKKNATQAPRLVRVGDAHRLTQGAFVGQPEAVNPLGREIQG

SEQ ID NO: 443 - DNA, 117 bp, Caulobacter sp.
  CDS (1)..(117)
atgaccaagacccatcgcaccccccgcctggtccgcgtcggcgacgcccatcgcctcacgcaaggctcgatcgtcggccgtcccgaggacttcctgccgggccgtcagaccccggcc

SEQ ID NO: 444 - protein, 39 aa, Caulobacter sp.
MTKTHRTPRLVRVGDAHRLTQGSIVGRPEDFLPGRQTPA

SEQ ID NO: 445 - DNA, 108 bp, Caulobacter sp.
  CDS (1)..(108)
atgtcacgcacctttcgcctgatccgcgtgggcgacgcccatcgcctgacccagagcggcatcatgggctggcccgaggacatcctgccgggacgccacatgcaggtt

SEQ ID NO: 446 - protein, 36 aa, Caulobacter sp.
MSRTFRLIRVGDAHRLTQSGIMGWPEDILPGRHMQV

SEQ ID NO: 447 - DNA, 180 bp, Caulobacter sp.
ttgaatatacgtccgcgccgccgcctccttgtcccgccgcgccttcgcggctttgggaaggagattgacgtgacctcatcgtttcgactgatccgccttggcgacgctcaccgcctgacccagggcgccttgctgggcctgctgttggaagacgtcaccacggctcgctacaacccgacc

SEQ ID NO: 448 - protein, 60 aa, Caulobacter sp.
MNIRPRRRLLVPPRLRGFGKEIDVTSSFRLIRLGDAHRLTQGALLGLLLEDVTTARYNPT

SEQ ID NO: 449 - DNA, 132 bp, Streptomyces sviceus
  CDS (1)..(132)
atgacctcgaccgacgagctgtacgaggcgcccgagctcatcgagatcggtgactacgccgaactcacgcgctgtgtgtggggcggagactgcaccgacttcctcggctgcggcaccgcctggatctgtgtc

SEQ ID NO: 450 - protein, 44 aa, Streptomyces sviceus
MTSTDELYEAPELIEIGDYAELTRCVWGGDCTDFLGCGTAWICV

SEQ ID NO: 451 - DNA, 132 bp, Streptomyces sviceus; identical to SEQ ID NO: 449
  CDS (1)..(132)

SEQ ID NO: 452 - protein, 44 aa, Streptomyces sviceus; identical to SEQ ID NO: 450

SEQ ID NO: 453 - DNA, 129 bp, Kibdelosporangium sp.
  CDS (1)..(129)
atgatcaaggatgacgagatctacgaggtgccgacgctggtcgaggtcggcgacttcgccgaactgacgctgggtctgccgtggggctgcccgaacgacctgttcttcgtgaacacgccgttcgcctgc

SEQ ID NO: 454 - protein, 43 aa, Kibdelosporangium sp.
MIKDDEIYEVPTLVEVGDFAELTLGLPWGCPNDLFFVNTPFAC

SEQ ID NO: 455 - DNA, 132 bp, Kibdelosporangium sp.
  CDS (1)..(132)
atgatccatgacgacgagatctacgaggtgccgacgctggtcgaggtcggcgagttcaccgaactgacactgggtatcccgtttgggttcgggtgcccggactacatgcacatgctcacgccgtacgcctgc

SEQ ID NO: 456 - protein, 44 aa, Kibdelosporangium sp.
MIHDDEIYEVPTLVEVGEFTELTLGIPFGFGCPDYMHMLTPYAC

SEQ ID NO: 457 - DNA, 132 bp, Kibdelosporangium sp.; identical to SEQ ID NO: 455
  CDS (1)..(132)

SEQ ID NO: 458 - protein, 44 aa, Kibdelosporangium sp.; identical to SEQ ID NO: 456

SEQ ID NO: 459 - DNA, 129 bp, Kibdelosporangium sp.; identical to SEQ ID NO: 453
  CDS (1)..(129)

SEQ ID NO: 460 - protein, 43 aa, Kibdelosporangium sp.; identical to SEQ ID NO: 454

SEQ ID NO: 461 - DNA, 120 bp, Streptomyces canus
  CDS (1)..(120)
atggccacgtacgacgagtacgagacccccgagctggtcgaggtcggcgagttctccgagctgaccctcggctgggacaaccagtgcgtcgactggttcaatggcggcgcctgggtctgc

SEQ ID NO: 462 - protein, 40 aa, Streptomyces canus
MATYDEYETPELVEVGEFSELTLGWDNQCVDWFNGGAWVC

SEQ ID NO: 463 - DNA, 120 bp, Streptomyces canus
  CDS (1)..(120)
atgaacgaggagacatacgagacgcccgagctcgtcgaggtcggcggcttcgcggagctgaccctgggcgccggtccgacggactgcgtcgactggtggggcggggacgcctggatctgc

SEQ ID NO: 464 - protein, 40 aa, Streptomyces canus
MNEETYETPELVEVGGFAELTLGAGPTDCVDWWGGDAWIC

SEQ ID NO: 465 - DNA, 102 bp, Streptomyces mobaraensis
  CDS (1)..(102)
atgaagccgaccctgttcaagcagggcgacttcaccaagaagacggccggctggttcatgagcaagaagtcggaaaacctgacctggcgcatcggcgggtcg

SEQ ID NO: 466 - protein, 34 aa, Streptomyces mobaraensis
MKPTLFKQGDFTKKTAGWFMSKKSENLTWRIGGS

SEQ ID NO: 467 - DNA, 102 bp, Streptomyces mobaraensis; identical to SEQ ID NO: 465
  CDS (1)..(102)

SEQ ID NO: 468 - protein, 34 aa, Streptomyces mobaraensis; identical to SEQ ID NO: 466

SEQ ID NO: 469 - DNA, 138 bp, Luteimonas sp.
  CDS (1)..(138)
atgaacgcgaacgacaacacccgtgaagccgcggcggacgacgtgatcgtgctgggcatcgccagcatcgagacccagggcatcgacctgggcttcgagccggtcggccggaccccgatggcggggatctctgaagag

SEQ ID NO: 470 - protein, 46 aa, Luteimonas sp.
MNANDNTREAAADDVIVLGIASIETQGIDLGFEPVGRTPMAGISEE

SEQ ID NO: 471 - DNA, 132 bp, Streptomyces sp.
  CDS (1)..(132)
atgaagaagcaggcgcaggaagcgaagaagagctatgcgaagcccgcgatggtcaagcagggcgacttcaccaaggtgacggccggctacttcgtcggctcgtacaaggagtggatcgtccgccgcatcgtc

SEQ ID NO: 472 - protein, 44 aa, Streptomyces sp.
MKKQAQEAKKSYAKPAMVKQGDFTKVTAGYFVGSYKEWIVRRIV

SEQ ID NO: 473 - DNA, 138 bp, Xanthomonas arboricola
  CDS (1)..(138)
atgaacatcaatgacaacgtccacggtaatgcgcaggatgaggtgatcgttcttggggttgcgagtgtggaaacccagggcatcttgcaggggaacgagccgatgggcgggcagcccgtcccgggcatttccgaggag

SEQ ID NO: 474 - protein, 46 aa, Xanthomonas arboricola
MNINDNVHGNAQDEVIVLGVASVETQGILQGNEPMGGQPVPGISEE

SEQ ID NO: 475 - DNA, 135 bp, Stenotrophomonas acidaminiphila
  CDS (1)..(135)
atgaacagcaacgacaacaccggcgtgcacgccgacgaagtgatcgtgctcggcgtcgccagcgtcgagacccagggcatcctgcagggcaacgagccgatgggcggcgagcccgtgccgggtatttccgaagag

SEQ ID NO: 476 - protein, 45 aa, Stenotrophomonas acidaminiphila
MNSNDNTGVHADEVIVLGVASVETQGILQGNEPMGGEPVPGISEE

SEQ ID NO: 477 - DNA, 138 bp, Nocardia sp.
  CDS (1)..(138)
atggagaacacggcagacagctcggacaagaggatctacgagaagccggtgatcgccaaatgcggcgatttccgcaacctcaccgggggcgttttcaccacggaatccgacctgctggtcggacgccgcggaatgatc

SEQ ID NO: 478 - protein, 46 aa, Nocardia sp.
MENTADSSDKRIYEKPVIAKCGDFRNLTGGVFTTESDLLVGRRGMI

SEQ ID NO: 479 - DNA, 138 bp, Xanthomonas cannabis
  CDS (1)..(138)
atggacacgaacaagaacgcccgcacccacgtgcaggatgaagtgatcgagctcggcgtcgccagcgtcgagaccaagggccagatgggaatcaccgagaacttcggtgcggttcccctcgacggcatctccgatgcc

SEQ ID NO: 480 - protein, 46 aa, Xanthomonas cannabis
MDTNKNARTHVQDEVIELGVASVETKGQMGITENFGAVPLDGISDA

SEQ ID NO: 481 - DNA, 141 bp, Luteimonas sp.
  CDS (1)..(141)
atgaacaccaacgacaacacccgcaccgaggtgcaggacgacgtgatcgagctcggcgttgcgagcgtcgagacgcagggcggcgcgttcgaccccggtgaggtgatggggctgaacatcacgccagggatctccgaggag

SEQ ID NO: 482 - protein, 47 aa, Luteimonas sp.
MNTNDNTRTEVQDDVIELGVASVETQGGAFDPGEVMGLNITPGISEE

SEQ ID NO: 483 - DNA, 141 bp, Burkholderia mallei; identical to SEQ ID NO: 47
  CDS (1)..(141)

SEQ ID NO: 484 - protein, 47 aa, Burkholderia mallei; identical to SEQ ID NO: 48

SEQ ID NO: 485 - DNA, 138 bp, Xanthomonas cannabis; identical to SEQ ID NO: 479
  CDS (1)..(138)

SEQ ID NO: 486 - protein, 46 aa, Xanthomonas cannabis; identical to SEQ ID NO: 480

SEQ ID NO: 487 - DNA, 129 bp, Saccharothrix espanaensis
  CDS (1)..(129)
atgacgaagaggacgttgccggagcgataccagacaccgtcggcacaagtggtcggtcgtttcaccagggacacgcgggcgctcgtccacgggctccgggaccaccgcggacgtggacgccacgagagc

SEQ ID NO: 488 - protein, 43 aa, Saccharothrix espanaensis
MTKRTLPERYQTPSAQVVGRFTRDTRALVHGLRDHRGRGRHES

SEQ ID NO: 489 - DNA, 147 bp, Rhodanobacter sp.
  CDS (1)..(147)
atggatacgaacgagaacatctgcagcaatacgcaggacgatgtcatcgagctcggcatcgccagtgtcgagaccaagggtggcagtggcccgatcgaaccgagtggcggacccggcctgccgttgatcccggggatttccgaggag

SEQ ID NO: 490 - protein, 49 aa, Rhodanobacter sp.
MDTNENICSNTQDDVIELGIASVETKGGSGPIEPSGGPGLPLIPGISEE

SEQ ID NO: 491 - DNA, 147 bp, Rhodanobacter denitrificans
  CDS (1)..(147)
atgaacacgaacgagaacatccgcaacgacacgccggaagacgtcatcgtgctcggtgttgccagtgtcgagacgaaaggccccatgggctccaccgaaccggaaggcgggctcggccggccggtgatccccggcatttccgaggag

SEQ ID NO: 492 - protein, 49 aa, Rhodanobacter denitrificans
MNTNENIRNDTPEDVIVLGVASVETKGPMGSTEPEGGLGRPVIPGISEE

SEQ ID NO: 493 - DNA, 144 bp, Rhodanobacter denitrificans
  CDS (1)..(144)
atgaacacgaacgagaacatccgtaccaacgcgccggaagacgtcatcgagctcggcatcgccagcgttgaaaccaagggcgagtttggcgtaaccgaggggggcgggcaaggcaagccgatgattcccggcatttccgaggaa

SEQ ID NO: 494 - protein, 48 aa, Rhodanobacter denitrificans
MNTNENIRTNAPEDVIELGIASVETKGEFGVTEGGGQGKPMIPGISEE

SEQ ID NO: 495 - DNA, 138 bp, Rhodanobacter sp.
  CDS (1)..(138)
atgaacgagaacatccgcaacgacacaccggaagacgtcatcgtgctcggcgtcgccagcgtcgagaccaagggcgatggtatccgaggcgaggttcctgggaccggcgctccgatgattccaggcatttccgaggag

SEQ ID NO: 496 - protein, 46 aa, Rhodanobacter sp.
MNENIRNDTPEDVIVLGVASVETKGDGIRGEVPGTGAPMIPGISEE

SEQ ID NO: 497 - DNA, 135 bp, Streptomyces celluloflavus
  CDS (1)..(135)
atgaccaagaacaagcagcagccggagcgttacgtgccgcccaccgtcgccaaggtcggccacttcagcaaggacacggacggaaccgtctacacgctgaaggacgccacgaccctgggcttcaagaagcccaag

SEQ ID NO: 498 - protein, 45 aa, Streptomyces celluloflavus
MTKNKQQPERYVPPTVAKVGHFSKDTDGTVYTLKDATTLGFKKPK

SEQ ID NO: 499 - DNA, 144 bp, Rhodanobacter sp.
  CDS (1)..(144)
atgaacacgaacgagaacatccgcaacgacacgccggaagaggtcatcgtgctcggtgttgccagtgtcgagaccaaggggcaacaaggcataggcgaggttcctgggaccggcggtccgatgatccccggcatttccgaggag

SEQ ID NO: 500 - protein, 48 aa, Rhodanobacter sp.
MNTNENIRNDTPEEVIVLGVASVETKGQQGIGEVPGTGGPMIPGISEE

SEQ ID NO: 501 - DNA, 117 bp, Rubrivivax benzoatilyticus
  CDS (1)..(117)
atggacgaagagaccgaactggacatcgtcgacctgggcgatgcgaaggacacgaccaagggcatcctgctgccgggcagcgaggacaacgtgacgatgcccggccggcagatcgcc

SEQ ID NO: 502 - protein, 39 aa, Rubrivivax benzoatilyticus
MDEETELDIVDLGDAKDTTKGILLPGSEDNVTMPGRQIA

SEQ ID NO: 503 - DNA, 123 bp, Xylanimonas cellulosilytica
  CDS (1)..(123)
atgcccagctacgctgctccgaagctcacccgcatcggctcgttcaagaccgtgacgaagagccttggcaaggcgccgcacaacgacatcttccggcgccccgcggtcttcgtcatctacctg

SEQ ID NO: 504 - protein, 41 aa, Xylanimonas cellulosilytica
MPSYAAPKLTRIGSFKTVTKSLGKAPHNDIFRRPAVFVIYL

SEQ ID NO: 505 - DNA, 123 bp, Streptomyces flocculus
  CDS (1)..(123)
atggagcacacctacgagccccccgccctcaccgagctcggcgacttcgaggagctgacgcagtgcctgccgtcgggtgactgccccgacttcctgggctgtggtcgcgcgatctggtgcatc

SEQ ID NO: 506 - protein, 41 aa, Streptomyces flocculus
MEHTYEPPALTELGDFEELTQCLPSGDCPDFLGCGRAIWCI

SEQ ID NO: 507 - DNA, 123 bp, Streptomyces sp.
  CDS (1)..(123)
atggagcacacctacgagccccccgccctcaccgagctcggcgacttcggggagctgacgcagtgcctgccgtcgggcgactgccccgacttcctgggctgcggtcgcgcgatctggtgcatc

SEQ ID NO: 508 - protein, 41 aa, Streptomyces sp.
MEHTYEPPALTELGDFGELTQCLPSGDCPDFLGCGRAIWCI

SEQ ID NO: 509 - DNA, 123 bp, Streptomyces flocculus; identical to SEQ ID NO: 505
  CDS (1)..(123)

SEQ ID NO: 510 - protein, 41 aa, Streptomyces flocculus; identical to SEQ ID NO: 506

SEQ ID NO: 511 - DNA, 123 bp, Xylanimonas cellulosilytica; identical to SEQ ID NO: 503
  CDS (1)..(123)

SEQ ID NO: 512 - protein, 41 aa, Xylanimonas cellulosilytica; identical to SEQ ID NO: 504

SEQ ID NO: 513 - DNA, 138 bp, Xanthomonas arboricola; identical to SEQ ID NO: 473
  CDS (1)..(138)

SEQ ID NO: 514 - protein, 46 aa, Xanthomonas arboricola; identical to SEQ ID NO: 474

SEQ ID NO: 515 - DNA, 123 bp, Streptomyces sp.; identical to SEQ ID NO: 507
  CDS (1)..(123)

SEQ ID NO: 516 - protein, 41 aa, Streptomyces sp.; identical to SEQ ID NO: 508

SEQ ID NO: 517 - DNA, 123 bp, Streptomyces sp.; identical to SEQ ID NO: 507
  CDS (1)..(123)

SEQ ID NO: 518 - protein, 41 aa, Streptomyces sp.; identical to SEQ ID NO: 508

SEQ ID NO: 519 - DNA, 144 bp, Rhodanobacter sp.
  CDS (1)..(144)
atgaacacgaacgagaacatccgcaacaacgcttcggaagacgtcatcgtgcttggcgtcgccagcgtcgaaacccagggcggccctggcagcaacgaagcggtcggtttcggcggcccggtgattcccgggatttccgaggag

SEQ ID NO: 520 - protein, 48 aa, Rhodanobacter sp.
MNTNENIRNNASEDVIVLGVASVETQGGPGSNEAVGFGGPVIPGISEE

SEQ ID NO: 521 - DNA, 105 bp, Ideonella sakaiensis
  CDS (1)..(105)
atgcaagtggaagtcgtcgacctgggagacgcgaaggaagtgaccctgggcgtcgagctggccttcaacgaagagctgatcgacgccctgccgcggctctacgac

SEQ ID NO: 522 - protein, 35 aa, Ideonella sakaiensis
MQVEVVDLGDAKEVTLGVELAFNEELIDALPRLYD

SEQ ID NO: 523 - DNA, 123 bp, Streptomyces flocculus; identical to SEQ ID NO: 505
  CDS (1)..(123)

SEQ ID NO: 524 - protein, 41 aa, Streptomyces flocculus; identical to SEQ ID NO: 506

SEQ ID NO: 525 - DNA, 123 bp, Cellulomonas sp.
  CDS (1)..(123)
atgagcacctactccgccccgcagctcacgcgcatcggatcgttcaagtccgtgacgaagagcctcggcaaggcgccgcacaacgacatcttccggcgccccgcgatcttcgtcatctacgtc

SEQ ID NO: 526 - protein, 41 aa, Cellulomonas sp.
MSTYSAPQLTRIGSFKSVTKSLGKAPHNDIFRRPAIFVIYV

SEQ ID NO: 527 - DNA, 132 bp, Sphingopyxis macrogoltabida
  CDS (1)..(132)
atgaacaagagcgaaatcagcatcgtcgatcttggcgatgcgcgcgtcgaaacccgcggcaccggcgaactcggcccgctggacatccagacgttccagcggacgtacaatgccggcattcaggccgacgat

SEQ ID NO: 528 - protein, 44 aa, Sphingopyxis macrogoltabida
MNKSEISIVDLGDARVETRGTGELGPLDIQTFQRTYNAGIQADD

SEQ ID NO: 529 - DNA, 141 bp, Blastomonas sp.
  CDS (1)..(141)
atgaatgcgtttgaaacccagaatgacgacgtcatcgatctcggcgccgtgcaggaagaaacccgcggctcggcgatcgctggcctcgacgacgtccagcccgggctgaagatcttcgtcggcggaatggaccgcgaggat

SEQ ID NO: 530 - protein, 47 aa, Blastomonas sp.
MNAFETQNDDVIDLGAVQEETRGSAIAGLDDVQPGLKIFVGGMDRED

SEQ ID NO: 531 - DNA, 141 bp, Novosphingobium sp.
  CDS (1)..(141)
atgaaagaacgtgaacataacgaaagtgatgtcattgagcttggcattgctcatatcgagaccaggggcaatgctctattcggccgtgatgacacccagaccggtatgaagtacggggtcgcgggaatttcatccgaagac

SEQ ID NO: 532 - protein, 47 aa, Novosphingobium sp.
MKEREHNESDVIELGIAHIETRGNALFGRDDTQTGMKYGVAGISSED

SEQ ID NO: 533 - DNA, 132 bp, Sphingopyxis macrogoltabida
  CDS (1)..(132)
atgaacaagagtgaaaacagcatcgtcgatcttggcgatgcccgtgtcgaaacccgcggcaccggcgaactcggcccgctggacatccagacgttccagcggacgtacaacgccggcatccagaccgacgat

SEQ ID NO: 534 - protein, 44 aa, Sphingopyxis macrogoltabida
MNKSENSIVDLGDARVETRGTGELGPLDIQTFQRTYNAGIQTDD

SEQ ID NO: 535 - DNA, 117 bp, Streptomyces sp.
  CDS (1)..(117)
atggagaacacgtacgaggctccggcgctcgtcgaggtcggcgacttcaccgaggtcaccctcggcgacggcacctggggcttcgacagcaagcgtcagtgcgcctggctcggctgc

SEQ ID NO: 536 - protein, 39 aa, Streptomyces sp.
MENTYEAPALVEVGDFTEVTLGDGTWGFDSKRQCAWLGC

SEQ ID NO: 537 - DNA, 138 bp, Xanthomonas arboricola; identical to SEQ ID NO: 473
  CDS (1)..(138)

SEQ ID NO: 538 - protein, 46 aa, Xanthomonas arboricola; identical to SEQ ID NO: 474

SEQ ID NO: 539 - DNA, 129 bp, Sphingopyxis sp.
  CDS (1)..(129)
atgaaaacgcatgacgacatcatcgatctcggcgccgcccaggacgaaaccctcggcgcgctgccgtcgggccagcaggacgtacagcccggggacaagtttatcctcggcggcatcagcgccgacgat

SEQ ID NO: 540 - protein, 43 aa, Sphingopyxis sp.
MKTHDDIIDLGAAQDETLGALPSGQQDVQPGDKFILGGISADD

SEQ ID NO: 541 - DNA, 93 bp, Streptomyces sp.
  CDS (1)..(93)
atgccgctgatcgtggaggtcggagatttccgtgagctgacccgttctgttcgccctggccactggatcgacttcttcggtggttggtggctg

SEQ ID NO: 542 - protein, 31 aa, Streptomyces sp.
MPLIVEVGDFRELTRSVRPGHWIDFFGGWWL

SEQ ID NO: 543 - DNA, 117 bp, Streptomyces avermitilis
  CDS (1)..(117)
atgaccgcagagacctcgtacgagacgcccatactcactgagatcggtgacttcgccgacgtcacccgcgccacctaccgcggcttctgggtggatttcctcggcggctggtggttc

SEQ ID NO: 544 - protein, 39 aa, Streptomyces avermitilis
MTAETSYETPILTEIGDFADVTRATYRGFWVDFLGGWWF

SEQ ID NO: 545 - DNA, 117 bp, Streptomyces avermitilis; identical to SEQ ID NO: 543
  CDS (1)..(117)

SEQ ID NO: 546 - protein, 39 aa, Streptomyces avermitilis; identical to SEQ ID NO: 544

SEQ ID NO: 547 - DNA, 129 bp, Caulobacter sp.
  CDS (1)..(129)
atgcggcaggtcgaaaaccaaaccgaagagctggtcgagctggggcgcgccagcgacgagacccaaggtccggacatgccgacctcggaggtcggcatcggccgtgcgcccttcggcatcaccgaagac

SEQ ID NO: 548 - protein, 43 aa, Caulobacter sp.
MRQVENQTEELVELGRASDETQGPDMPTSEVGIGRAPFGITED

SEQ ID NO: 549 - DNA, 129 bp, Caulobacter sp.
  CDS (1)..(129)
atggaacggaccgaacaccgcatcgacgacctgatcgaactgggcgcggccagcgtcgagaccaagggcgccgatctgccgacctcggaagtcggcatcggccggcagccggccggcatcaccgaggac

SEQ ID NO: 550 - protein, 43 aa, Caulobacter sp.
MERTEHRIDDLIELGAASVETKGADLPTSEVGIGRQPAGITED

SEQ ID NO: 551 - DNA, 135 bp, Novosphingobium resinovorum
  CDS (1)..(135)
atggatcgcatagaagtggaagacaaggaagtcatcgaactcggcacggcctcggaggcgacgaaaggcgaagcgctgatcgatcaggatccgggcgtcggtcgcctgaccttcctttccggcatcgttgccgac

SEQ ID NO: 552 - protein, 45 aa, Novosphingobium resinovorum
MDRIEVEDKEVIELGTASEATKGEALIDQDPGVGRLTFLSGIVAD

SEQ ID NO: 553 - DNA, 132 bp, Sphingopyxis sp.
  CDS (1)..(132)
atggacaagcgtgaaaccggtatcgtcgatctgggcgatgcgcgcaccgaaacccgcgggctcggcgtcgaaggtccgatcgaccttgcgactctccagcggacctacaacgacggcatccaggccgacgac

SEQ ID NO: 554 - protein, 44 aa, Sphingopyxis sp.
MDKRETGIVDLGDARTETRGLGVEGPIDLATLQRTYNDGIQADD

SEQ ID NO: 555 - DNA, 132 bp, Sphingopyxis fribergensis
  CDS (1)..(132)
atggacaagcatgaaaacggcatcgtcgacctgggcgatgcgcgcatcgaaacccgcgggtcgggaggcaacggcgacatcgacctccagacgttccagcgctacgtcgcgggcggcatcgagaccgacgac

SEQ ID NO: 556 - protein, 44 aa, Sphingopyxis fribergensis
MDKHENGIVDLGDARIETRGSGGNGDIDLQTFQRYVAGGIETDD

SEQ ID NO: 557 - DNA, 129 bp, Streptomyces violaceusniger
gtgaacacggaaaagctggagtacgagccgcccgtgctggccgaggtcggcgacttcgccgagctgacccgggtcacctgctgcggcaggtggatcgacaacatctgggtctccgcctggttcgacttc

SEQ ID NO: 558 - protein, 43 aa, Streptomyces violaceusniger
MNTEKLEYEPPVLAEVGDFAELTRVTCCGRWIDNIWVSAWFDF

SEQ ID NO: 559 - DNA, 129 bp, Streptomyces violaceusniger
  CDS (1)..(129)
atggtcacagagcaatgggaatacgagccgccgattctggtcgaggtcggcgacttcgccgtcctcacccgtttgggctgctgcggccggtggctcgacaacatgttcatcacggggtggttcgacatc

SEQ ID NO: 560 - protein, 43 aa, Streptomyces violaceusniger
MVTEQWEYEPPILVEVGDFAVLTRLGCCGRWLDNMFITGWFDI

SEQ ID NO: 561 - DNA, 129 bp, Streptomyces violaceusniger; identical to SEQ ID NO: 557

SEQ ID NO: 562 - protein, 43 aa, Streptomyces violaceusniger; identical to SEQ ID NO: 558

SEQ ID NO: 563 - DNA, 129 bp, Streptomyces violaceusniger; identical to SEQ ID NO: 559
  CDS (1)..(129)

SEQ ID NO: 564 - protein, 43 aa, Streptomyces violaceusniger; identical to SEQ ID NO: 560

SEQ ID NO: 565 - DNA, 114 bp, Ideonella sakaiensis
  CDS (1)..(114)
atggatgaactggacgtggacatcgtcgagctgggcgatgcgaaggaagtgacccagggccaggtcggcggcttcaaccaggagctggccgacgagctgccgcgcgtctggaac

SEQ ID NO: 566 - protein, 38 aa, Ideonella sakaiensis
MDELDVDIVELGDAKEVTQGQVGGFNQELADELPRVWN

SEQ ID NO: 567 - DNA, 129 bp, Nocardiopsis halophila
  CDS (1)..(129)
atgaagaagtacaccactccggccctcacccggatcggctccttcaggaagctcacgaagtcgctgggccgccttccctgcaatgacatcttcggccagaaggccctgtggaccacctccccgaactgc

SEQ ID NO: 568 - protein, 43 aa, Nocardiopsis halophila
MKKYTTPALTRIGSFRKLTKSLGRLPCNDIFGQKALWTTSPNC

SEQ ID NO: 569 - DNA, 108 bp, Streptomyces avermitilis
  CDS (1)..(108)
atgaagaaggcttacgaggctccgacgctggtccggctcggaacgttccggaagaagaccgggctcttggggcgctccggcaacgaccgtctcatcctgagcaagaac

SEQ ID NO: 570 - protein, 36 aa, Streptomyces avermitilis
MKKAYEAPTLVRLGTFRKKTGLLGRSGNDRLILSKN

SEQ ID NO: 571 - DNA, 108 bp, Streptomyces avermitilis; identical to SEQ ID NO: 569
  CDS (1)..(108)

SEQ ID NO: 572 - protein, 36 aa, Streptomyces avermitilis; identical to SEQ ID NO: 570

SEQ ID NO: 573 - DNA, 108 bp, Streptomyces decoyicus
  CDS (1)..(108)
atgaagaaggcttacgaggcgccgacactggtccggctcgggacgttccggaagaagaccgggctcttgcagagctccggcaacgaccgtctcatcctgagcaagaac

SEQ ID NO: 574 - protein, 36 aa, Streptomyces decoyicus
MKKAYEAPTLVRLGTFRKKTGLLQSSGNDRLILSKN

SEQ ID NO: 575 - DNA, 108 bp, Streptomyces decoyicus; identical to SEQ ID NO: 573
  CDS (1)..(108)

SEQ ID NO: 576 - protein, 36 aa, Streptomyces decoyicus; identical to SEQ ID NO: 574

SEQ ID NO: 577 - DNA, 117 bp, Amycolatopsis nigrescens
  CDS (1)..(117)
atgacgaagcgtacctatgagactccggtcctggtgagcgctggttccttcgcgcgtcggaccggttccggcagcccgaaggcggcccgtgacccgttcggccgcaggtggctgccg

SEQ ID NO: 578 - protein, 39 aa, Amycolatopsis nigrescens
MTKRTYETPVLVSAGSFARRTGSGSPKAARDPFGRRWLP

SEQ ID NO: 579 - DNA, 132 bp, Sphingopyxis sp.; identical to SEQ ID NO: 553
  CDS (1)..(132)

SEQ ID NO: 580 - protein, 44 aa, Sphingopyxis sp.; identical to SEQ ID NO: 554

SEQ ID NO: 581 - DNA, 108 bp, Streptomyces lydicus
  CDS (1)..(108)
atgaagaaggcttacgaagcacctaccctcgtccggctggggacgttccggaagaagaccggactcctcaacagctccggaaacgaccgtctgatcctgagcaagaac

SEQ ID NO: 582 - protein, 36 aa, Streptomyces lydicus
MKKAYEAPTLVRLGTFRKKTGLLNSSGNDRLILSKN

SEQ ID NO: 583 - DNA, 108 bp, Streptomyces sp.
  CDS (1)..(108)
atgaagaaggcatacgaagcaccgaccctcgtccggctggggacgttccggaagaagaccggactcctcagcagctccggaaacgaccggctgatcctgagcaagaac

SEQ ID NO: 584 - protein, 36 aa, Streptomyces sp.
MKKAYEAPTLVRLGTFRKKTGLLSSSGNDRLILSKN

SEQ ID NO: 585 - DNA, 105 bp, Amycolatopsis orientalis
  CDS (1)..(105)
atgaaggaatacgagacccccatgctgatcgaggccggcgagttcggtgaggtcaccggcctgctgcagtcgtcgggcaacgaccggctgatcttcagcaagaac

SEQ ID NO: 586 - protein, 35 aa, Amycolatopsis orientalis
MKEYETPMLIEAGEFGEVTGLLQSSGNDRLIFSKN

SEQ ID NO: 587 - DNA, 117 bp, Amycolatopsis nigrescens; identical to SEQ ID NO: 577
  CDS (1)..(117)

SEQ ID NO: 588 - protein, 39 aa, Amycolatopsis nigrescens; identical to SEQ ID NO: 578

SEQ ID NO: 589 - DNA, 108 bp, Streptomyces galbus
  CDS (1)..(108)
atgaagaaggcttacgaagcaccgacgctggtccgcctcgggacgttccggaagaagaccgggttcttgcagagctccggcaacgaccgtctcatcctgagcaagaac

SEQ ID NO: 590 - protein, 36 aa, Streptomyces galbus
MKKAYEAPTLVRLGTFRKKTGFLQSSGNDRLILSKN

SEQ ID NO: 591 - DNA, 111 bp, Streptomyces chartreusis
  CDS (1)..(111)
atgcgcacctacgagcgtccgacgctgactgcggtcggctccttccgcaagaccggtctgggcttcagggacgggccggagaggttctggttcttccggaggaggttcttc

SEQ ID NO: 592 - protein, 37 aa, Streptomyces chartreusis
MRTYERPTLTAVGSFRKTGLGFRDGPERFWFFRRRFF

SEQ ID NO: 593 - DNA, 108 bp, Streptomyces katrae
  CDS (1)..(108)
atgaagaaggcgtacgaagctccgacgctcgcgcgactgggttccttcaggaagaagaccgggctgctgggtcgctccggcaatgaccgcctggtcctcagcaagaac

SEQ ID NO: 594 - protein, 36 aa, Streptomyces katrae
MKKAYEAPTLARLGSFRKKTGLLGRSGNDRLVLSKN

SEQ ID NO: 595 - DNA, 108 bp, Streptomyces lydicus
  CDS (1)..(108)
atgaagaaggcgtacgaagccccgaccctcgtccggctcggcacgttccgtcagcggaccgggctcctgcaggcgcacggcaacgaccgtctgatcttcagcaagaac

SEQ ID NO: 596 - protein, 36 aa, Streptomyces lydicus
MKKAYEAPTLVRLGTFRQRTGLLQAHGNDRLIFSKN

SEQ ID NO: 597 - DNA, 102 bp, Streptomyces aureocirculatus
  CDS (1)..(102)
atggtggaagtcggcgacttcaccgagctgacccggggtgaggcgcttggcgcgcactacgagggcggcttccctccctacgagtggtacctcggccccaac

SEQ ID NO: 598 - protein, 34 aa, Streptomyces aureocirculatus
MVEVGDFTELTRGEALGAHYEGGFPPYEWYLGPN

SEQ ID NO: 599 - DNA, 108 bp, Streptomyces lydicus; identical to SEQ ID NO: 595
  CDS (1)..(108)

SEQ ID NO: 600 - protein, 36 aa, Streptomyces lydicus; identical to SEQ ID NO: 596

SEQ ID NO: 601 - DNA, 108 bp, Streptomyces aurantiacus
  CDS (1)..(108)
atgaagaaggcgtacgaagccccgaccctcgtccggctcgggacgttccgtcagcggaccggtctcttgcagcgccacggcaacgaccgtctgatcttcagcaagaac

SEQ ID NO: 602 - protein, 36 aa, Streptomyces aurantiacus
MKKAYEAPTLVRLGTFRQRTGLLQRHGNDRLIFSKN

SEQ ID NO: 603 - DNA, 108 bp, Streptomyces aurantiacus; identical to SEQ ID NO: 601
  CDS (1)..(108)

SEQ ID NO: 604 - protein, 36 aa, Streptomyces aurantiacus; identical to SEQ ID NO: 602

SEQ ID NO: 605 - DNA, 108 bp, Streptomyces sp.
  CDS (1)..(108)
atgaagaagacctacgaagcaccgaccctcgtccggctggggacgttccggaagaagaccgggctcctgggcaactccggaaacgaccgtctgctcctgagcaagaac

SEQ ID NO: 606 - protein, 36 aa, Streptomyces sp.
MKKTYEAPTLVRLGTFRKKTGLLGNSGNDRLLLSKN

SEQ ID NO: 607 - DNA, 108 bp, Streptomyces chattanoogensis
  CDS (1)..(108)
atgaagaaggcatacgaagccccgaccctcgtccggctcggcacgttccgtcagcggaccgggctcctgtcgaagcacggcaacgaccgtgtgatcttcagcaagaac

SEQ ID NO: 608 - protein, 36 aa, Streptomyces chattanoogensis
MKKAYEAPTLVRLGTFRQRTGLLSKHGNDRVIFSKN

SEQ ID NO: 609 - DNA, 138 bp, Nocardiopsis alba
  CDS (1)..(138)
atggacgaagaaaagatcggcaacgaaatctccgcctacgagactccgaccgtcaccgagatgggcgcgttctccgaggtcaccctcggccgccccaactggggattcgagaacgactggtcctgcgtccgggtctgc

SEQ ID NO: 610 - protein, 46 aa, Nocardiopsis alba
MDEEKIGNEISAYETPTVTEMGAFSEVTLGRPNWGFENDWSCVRVC

SEQ ID NO: 611 - DNA, 138 bp, Nocardiopsis alba; identical to SEQ ID NO: 609
  CDS (1)..(138)

SEQ ID NO: 612 - protein, 46 aa, Nocardiopsis alba; identical to SEQ ID NO: 610

SEQ ID NO: 613 - DNA, 117 bp, Sphingobium barthaii; identical to SEQ ID NO: 207
  CDS (1)..(117)

SEQ ID NO: 614 - protein, 39 aa, Sphingobium barthaii; identical to SEQ ID NO: 208

SEQ ID NO: 615 - DNA, 138 bp, Nocardiopsis alba; identical to SEQ ID NO: 609
  CDS (1)..(138)

SEQ ID NO: 616 - protein, 46 aa, Nocardiopsis alba; identical to SEQ ID NO: 610

SEQ ID NO: 617 - DNA, 123 bp, Actinomadura oligospora
  CDS (1)..(123)
atgctctacacaccgcccgaactgactcgactcggcaacttcacgcaggtcaccctcggccacccgagctggggttgggagtgggacagcaagtgcttctggctcaactgcgtgggcaagaac

SEQ ID NO: 618 - protein, 41 aa, Actinomadura oligospora
MLYTPPELTRLGNFTQVTLGHPSWGWEWDSKCFWLNCVGKN

SEQ ID NO: 619 - DNA, 108 bp, Streptomyces sp.
  CDS (1)..(108)
atgaagaaggcctacgaggcaccgacgctcgtccggctcggcaccttccggaaggagaccgggctcctcggagacgccggcaacgaccggctgatcctgagcaagaac

SEQ ID NO: 620 - protein, 36 aa, Streptomyces sp.
MKKAYEAPTLVRLGTFRKETGLLGDAGNDRLILSKN

SEQ ID NO: 621 - DNA, 99 bp, Nocardia sp.
  CDS (1)..(99)
atgtacgagactccgcagctgatcgacctcggcaccttcgacgagcagaccggcctgctcgggttctccggcaacgaccggctgatcctcagcaagaac

SEQ ID NO: 622 - protein, 33 aa, Nocardia sp.
MYETPQLIDLGTFDEQTGLLGFSGNDRLILSKN

SEQ ID NO: 623 - DNA, 180 bp, Kibdelosporangium aridum
  CDS (1)..(180)
atgccaacagtctgcggggctggatatggctgtgcacgtacacggatcgatgcggtgaaaggaggtgcgagtatccgtacttacgagcgtccaacgctgatgaggatgggctcgttcgcccggctgaccggcctgggcgggcgtggcccgcgtgaccttctgttccggcaccagctcctt

SEQ ID NO: 624 - protein, 60 aa, Kibdelosporangium aridum
MPTVCGAGYGCARTRIDAVKGGASIRTYERPTLMRMGSFARLTGLGGRGPRDLLFRHQLL

SEQ ID NO: 625 - DNA, 108 bp, Streptomyces davawensis
  CDS (1)..(108)
atgaagaaggtctacgaggcgccgacgctggtgcgactgggttcgttccggaagcagacggggctgctggggcgctcgggcaacgaccggctgatcctcagcaagaac

SEQ ID NO: 626 - protein, 36 aa, Streptomyces davawensis
MKKVYEAPTLVRLGSFRKQTGLLGRSGNDRLILSKN

SEQ ID NO: 627 - DNA, 108 bp, Streptomyces xinghaiensis
  CDS (1)..(108)
atgcgcaaggcttacgaggcgccggtgctggtcgaactgggcgggttccgggagaagacggggctgctggggcgccacggcaacgaccgtctgatcctcagcaagaac

SEQ ID NO: 628 - protein, 36 aa, Streptomyces xinghaiensis
MRKAYEAPVLVELGGFREKTGLLGRHGNDRLILSKN

SEQ ID NO: 629 - DNA, 141 bp, Streptomyces sp.
  CDS (1)..(141)
atgcccgagatccaggaacagaccgagacggtggagtacgaagcgccggagctggccgaggccggtgagttcgccgagctgacgctcgggttccacggccaccactgggacgccttcggaggccgcggccacggctggtgg

SEQ ID NO: 630 - protein, 47 aa, Streptomyces sp.
MPEIQEQTETVEYEAPELAEAGEFAELTLGFHGHHWDAFGGRGHGWW

SEQ ID NO: 631 - DNA, 108 bp, Streptomyces pristinaespiralis
gtgaagaaggcttacgaggcgccgacgctggttcggctgggatcgttccgaacgaagaccgggcttcttgggaagcacggcaacgaccgtctcatcctgagcaagaac

SEQ ID NO: 632 - protein, 36 aa, Streptomyces pristinaespiralis
MKKAYEAPTLVRLGSFRTKTGLLGKHGNDRLILSKN

SEQ ID NO: 633 - DNA, 108 bp, Streptomyces pristinaespiralis; identical to SEQ ID NO: 631

SEQ ID NO: 634 - protein, 36 aa, Streptomyces pristinaespiralis; identical to SEQ ID NO: 632

SEQ ID NO: 635 - DNA, 108 bp, Streptomyces auratus
  CDS (1)..(108)
atgaagaaggcttacgaagcgccgacgctcgtccgactgggttcgttccggaagaagaccgggctcctgaacagttccgggaacgaccggctgatcctgagcaagaac

SEQ ID NO: 636 - protein, 36 aa, Streptomyces auratus
MKKAYEAPTLVRLGSFRKKTGLLNSSGNDRLILSKN

SEQ ID NO: 637 - DNA, 117 bp, Streptomyces albulus
  CDS (1)..(117)
atggccaagaaggtctatgaggttccggcgctgttcaaggccggccagttcgccaaggacaccggattcctgaagcgcggaccgcacgagcccaaggtccgtctgccgctgggctgg

SEQ ID NO: 638 - protein, 39 aa, Streptomyces albulus
MAKKVYEVPALFKAGQFAKDTGFLKRGPHEPKVRLPLGW

SEQ ID NO: 639 - DNA, 114 bp, Ideonella sakaiensis; identical to SEQ ID NO: 565
  CDS (1)..(114)

SEQ ID NO: 640 - protein, 38 aa, Ideonella sakaiensis; identical to SEQ ID NO: 566

SEQ ID NO: 641 - DNA, 123 bp, Kibdelosporangium phytohabitans
  CDS (1)..(123)
atgcagacgaagtcggcagagtacgtcaaaccggttctgcgtcaggttggtggtttcgccacgctgacccgcggactcctcgggaggcgcagggattcccgtaaccgcttgcgccctcaggcc

SEQ ID NO: 642 - protein, 41 aa, Kibdelosporangium phytohabitans
MQTKSAEYVKPVLRQVGGFATLTRGLLGRRRDSRNRLRPQA

SEQ ID NO: 643 - DNA, 111 bp, Nocardiopsis potens
  CDS (1)..(111)
atggaggtgtacgagccgccggagttcattgaaatcggtgacttcgctgagctcacccgtctgacccgcgacgggaactgggtggacagcccgggctggggctggtggctc

SEQ ID NO: 644 - protein, 37 aa, Nocardiopsis potens
MEVYEPPEFIEIGDFAELTRLTRDGNWVDSPGWGWWL

SEQ ID NO: 645 - DNA, 108 bp, Streptomyces pactum
  CDS (1)..(108)
atgaagaaggcgtacgaggccccgacgctcgtccggctggggtcgttccggcagaagaccgggctgctgcagcgcaacggcaacgaccgtctgatcctcagcaagaac

SEQ ID NO: 646 - protein, 36 aa, Streptomyces pactum
MKKAYEAPTLVRLGSFRQKTGLLQRNGNDRLILSKN

SEQ ID NO: 647 - DNA, 108 bp, Streptomyces auratus; identical to SEQ ID NO: 635
  CDS (1)..(108)

SEQ ID NO: 648 - protein, 36 aa, Streptomyces auratus; identical to SEQ ID NO: 636

SEQ ID NO: 649 - DNA, 111 bp, Streptomyces viridochromogenes
  CDS (1)..(111)
atgcgcacctacgagcgtccgacgctgactgcggtcggctccttccgcaagaccggtctgggcttcaaggacggaccggaacgtttctggttcttccggaggaagttcttc

SEQ ID NO: 650 - protein, 37 aa, Streptomyces viridochromogenes
MRTYERPTLTAVGSFRKTGLGFKDGPERFWFFRRKFF

SEQ ID NO: 651 - DNA, 108 bp, Streptomyces sp.
  CDS (1)..(108)
atgaagaaggcctacgaagcgccgggactcgtccggctcgggacgttccggaagaagaccgggctgctgcggcgctccggcaacgaccgactcatcctgagcaagaac

SEQ ID NO: 652 - protein, 36 aa, Streptomyces sp.
MKKAYEAPGLVRLGTFRKKTGLLRRSGNDRLILSKN

SEQ ID NO: 653 - DNA, 108 bp, Streptomyces aureocirculatus
  CDS (1)..(108)
atgaagaaggtttacgaagcgccggcactcgtccggctcgggacgttccgcaagaagaccgggcttctgcagcggcacggcaatgaccggctcatcctgagcaagaac

SEQ ID NO: 654 - protein, 36 aa, Streptomyces aureocirculatus
MKKVYEAPALVRLGTFRKKTGLLQRHGNDRLILSKN

SEQ ID NO: 655 - DNA, 108 bp, Streptomyces natalensis
  CDS (1)..(108)
atgaagaaggcatacgaggccccgaccctggtgcggcgcggagacttccggaccgagaccgggctgcttgagttccgcggcaacgaccggctcatcctcagcaagaac

SEQ ID NO: 656 - protein, 36 aa, Streptomyces natalensis
MKKAYEAPTLVRRGDFRTETGLLEFRGNDRLILSKN

SEQ ID NO: 657 - DNA, 141 bp, Streptomyces monomycini
  CDS (1)..(141)
atgcaggacgtacaggaacgtgccgaggcgaccgagtacgaggcgccggagctggccgaggctggtcgcttcaccgagcggacactggggttcaccggtgaacactccgacaactggggcgggatgcacagcaccttctgg

SEQ ID NO: 658 - protein, 47 aa, Streptomyces monomycini
MQDVQERAEATEYEAPELAEAGRFTERTLGFTGEHSDNWGGMHSTFW

SEQ ID NO: 659 - DNA, 108 bp, Streptomyces griseus
  CDS (1)..(108)
atgaagaaggcttacgaggcaccgacgctcgtccggctcggaacgttccgcaaggagacgggactcctcggtcgcgccggcaacgaccggctgatcctgagcaagaac

SEQ ID NO: 660 - protein, 36 aa, Streptomyces griseus
MKKAYEAPTLVRLGTFRKETGLLGRAGNDRLILSKN

SEQ ID NO: 661 - DNA, 117 bp, Streptomyces flavotricini
  CDS (1)..(117)
atggccaagaaggtctacgaggttccggcgctttccaaggccggcgacttccgcaaggacaccggcttcctgaagcgcgggccgcacgagcccaaggtccgtctgcctctgggctgg

SEQ ID NO: 662 - protein, 39 aa, Streptomyces flavotricini
MAKKVYEVPALSKAGDFRKDTGFLKRGPHEPKVRLPLGW

SEQ ID NO: 663 - DNA, 141 bp, Streptomyces rimosus
  CDS (1)..(141)
atgcgggaagcgccggaagtggacgagacgaccgagtacgaaccgcccgagctggccgacgccggggacttcgccgagcggacgctcggctacaccggcgaactgtccgacagctggggcggtatgcacagcaccttctgg

SEQ ID NO: 664 - protein, 47 aa, Streptomyces rimosus
MREAPEVDETTEYEPPELADAGDFAERTLGYTGELSDSWGGMHSTFW

SEQ ID NO: 665 - DNA, 135 bp, Streptomyces sp.
  CDS (1)..(135)
atgggtgagcacactgaggttctgtacgtgccgccggcgctggaggaaatcggggacttcgccaaggagacccgcggcggcaccggcgatcttcaagaaccgtttatcggccgcttcaactttcctcagcaacct

SEQ ID NO: 666 - protein, 45 aa, Streptomyces sp.
MGEHTEVLYVPPALEEIGDFAKETRGGTGDLQEPFIGRFNFPQQP

SEQ ID NO: 667 - DNA, 120 bp, Streptomyces olivaceus
  CDS (1)..(120)
atggccaaggaagacgtgtacgaggttcccgccctgatcgaggtcggcgacttcgccgagctcacccagctgacgtcccagggctactggatcgacagcccgtggggcgcctggtggctc

SEQ ID NO: 668 - protein, 40 aa, Streptomyces olivaceus
MAKEDVYEVPALIEVGDFAELTQLTSQGYWIDSPWGAWWL

SEQ ID NO: 669 - DNA, 168 bp, Kutzneria albida
  CDS (1)..(168)
atgtggacttcgggtgcggagccgcgcccgggaggaagaagaggaggacacgtggaagcacaggacctctacgaaccacccgcggtggtggagatcggcgactacgccgagctgacgatgggcggggtcggcaccgtcttcgacacctggggcctcacgcccatcccg

SEQ ID NO: 670 - protein, 56 aa, Kutzneria albida
MWTSGAEPRPGGRRGGHVEAQDLYEPPAVVEIGDYAELTMGGVGTVFDTWGLTPIP

SEQ ID NO: 671 - DNA, 117 bp, Streptomyces flavidovirens
  CDS (1)..(117)
atgcgcacctacgagcgtccgaccctgactccgatgggttcgttcgggaaggtgaccggcggacgagtcaagaggacaggccctcctgacattctccaccgccaccgcctggtcggc

SEQ ID NO: 672 - protein, 39 aa, Streptomyces flavidovirens
MRTYERPTLTPMGSFGKVTGGRVKRTGPPDILHRHRLVG

SEQ ID NO: 673 - DNA, 117 bp, Streptomyces flavotricini; identical to SEQ ID NO: 661
  CDS (1)..(117)

SEQ ID NO: 674 - protein, 39 aa, Streptomyces flavotricini; identical to SEQ ID NO: 662

SEQ ID NO: 675 - DNA, 120 bp, Streptomyces olivaceus; identical to SEQ ID NO: 667
  CDS (1)..(120)

SEQ ID NO: 676 - protein, 40 aa, Streptomyces olivaceus; identical to SEQ ID NO: 668

SEQ ID NO: 677 - DNA, 105 bp, Spirillospora albida
  CDS (1)..(105)
atgaagcagtacgaaacacccgtcctcgtgccggtcggctccttccggaaggtcaccgggcttctgcagaagcacggcaacgaccgcctgatcctcagcaagaac

SEQ ID NO: 678 - protein, 35 aa, Spirillospora albida
MKQYETPVLVPVGSFRKVTGLLQKHGNDRLILSKN

SEQ ID NO: 679 - DNA, 108 bp, Streptomyces sp.
  CDS (1)..(108)
atgaagaagacatacgaagcaccgacgctgatccggatcggagcgttccggaagaagaccgggttcctgatgcgcgccggcaacgaccggctcatcctgagcaagaac

SEQ ID NO: 680 - protein, 36 aa, Streptomyces sp.
MKKTYEAPTLIRIGAFRKKTGFLMRAGNDRLILSKN

SEQ ID NO: 681 - DNA, 111 bp, Streptomyces sp.
  CDS (1)..(111)
atgcgcacctacgagcgtccgacgctgactgcggtcggctccttccgcaagaccggtctgggcttcagggcagggccggagaggttctggttcttccggaggaggttcttc

SEQ ID NO: 682 - protein, 37 aa, Streptomyces sp.
MRTYERPTLTAVGSFRKTGLGFRAGPERFWFFRRRFF

SEQ ID NO: 683 - DNA, 114 bp, Streptomyces iranensis
  CDS (1)..(114)
atggacgcgattcgctacgaggcacccgcgctgttcgagatcggtggattctccgagaagacccgctgggtcagggtcgggtgggtcccggacctcctcagcacgttcggcggc

SEQ ID NO: 684 - protein, 38 aa, Streptomyces iranensis
MDAIRYEAPALFEIGGFSEKTRWVRVGWVPDLLSTFGG

SEQ ID NO: 685 - DNA, 114 bp, Streptomyces iranensis
  CDS (1)..(114)
atggacacgactcgttacgaggcacccgcgctgttcgagatcggtggattctccgagaagacccgctgggtcagcatgggatggcttccggatctcttcaccacgttcggcggc

SEQ ID NO: 686 - protein, 38 aa, Streptomyces iranensis
MDTTRYEAPALFEIGGFSEKTRWVSMGWLPDLFTTFGG

SEQ ID NO: 687 - DNA, 105 bp, Amycolatopsis lurida
  CDS (1)..(105)
atgaaggaatacgagacccccatgttgatcgacgccggcgagttcgaagaggtcaccggcctgctcgccaggcacggcaacgaccggctgatcttcagcaagaac

SEQ ID NO: 688 - protein, 35 aa, Amycolatopsis lurida
MKEYETPMLIDAGEFEEVTGLLARHGNDRLIFSKN

SEQ ID NO: 689 - DNA, 141 bp, Streptomyces rimosus
  CDS (1)..(141)
atgcgggaagcgccggaagcgaacgagacggccgagtacgaaccacccgagctggccgaggccggtgctttcgccgagcggacgctcggcttcaccggtgaactctccgacagctggggcggccagcacagcaccttctgg

SEQ ID NO: 690 - protein, 47 aa, Streptomyces rimosus
MREAPEANETAEYEPPELAEAGAFAERTLGFTGELSDSWGGQHSTFW

SEQ ID NO: 691 - DNA, 135 bp, Streptomyces sp.; identical to SEQ ID NO: 665
  CDS (1)..(135)

SEQ ID NO: 692 - protein, 45 aa, Streptomyces sp.; identical to SEQ ID NO: 666

SEQ ID NO: 693 - DNA, 141 bp, Streptomyces rimosus; identical to SEQ ID NO: 689
  CDS (1)..(141)

SEQ ID NO: 694 - protein, 47 aa, Streptomyces rimosus; identical to SEQ ID NO: 690

SEQ ID NO: 695 - DNA, 108 bp, Streptomyces sp.
  CDS (1)..(108)
atgaagaaggcatatgaagcgccgacgctcgtccggctcggaacgttccgcaaggagacggggctcctgggacgccacggcaacgaccgtctgatcctgagcaagaac

SEQ ID NO: 696 - protein, 36 aa, Streptomyces sp.
MKKAYEAPTLVRLGTFRKETGLLGRHGNDRLILSKN

SEQ ID NO: 697 - DNA, 117 bp, Streptomyces ipomoeae
  CDS (1)..(117)
atggccaggaaggtctacgaggttccggcgctgtccaaggccggcgacttccgcaaggacaccggattcctgaagcgcgggccgcacgagcccaaggtccgtctgcctctgggcctg

SEQ ID NO: 698 - protein, 39 aa, Streptomyces ipomoeae
MARKVYEVPALSKAGDFRKDTGFLKRGPHEPKVRLPLGL

SEQ ID NO: 699 - DNA, 108 bp, Streptomyces sp.
  CDS (1)..(108)
atgaagaaggcatacgaggcgccgacgctcgtccggctcggtacgttccggaaggagacggggctcctccagcgctccggcaacgaccggctgatcctgagcaagaac

SEQ ID NO: 700 - protein, 36 aa, Streptomyces sp.
MKKAYEAPTLVRLGTFRKETGLLQRSGNDRLILSKN

SEQ ID NO: 701 - DNA, 141 bp, Streptomyces rimosus; identical to SEQ ID NO: 689
  CDS (1)..(141)

SEQ ID NO: 702 - protein, 47 aa, Streptomyces rimosus; identical to SEQ ID NO: 690

SEQ ID NO: 703 - DNA, 108 bp, Streptomyces leeuwenhoekii
  CDS (1)..(108)
atgaagaaggcgtacgaggcccccaccctcgtccggctggggtcgttccgccggaagaccgggctgctgcagcgcagcggcaacgaccgtctgatcctcagcaagaac

SEQ ID NO: 704 - protein, 36 aa, Streptomyces leeuwenhoekii
MKKAYEAPTLVRLGSFRRKTGLLQRSGNDRLILSKN

SEQ ID NO: 705 - DNA, 108 bp, Streptomyces leeuwenhoekii; identical to SEQ ID NO: 703
  CDS (1)..(108)

SEQ ID NO: 706 - protein, 36 aa, Streptomyces leeuwenhoekii; identical to SEQ ID NO: 704

SEQ ID NO: 707 - DNA, 90 bp, Streptomyces mobaraensis
  CDS (1)..(90)
atgttcgaggtcggctctttccaggaggacaccggatacatcggcctcgagggctccgaaccgatcacgcacagcttctcgaagttctgg

SEQ ID NO: 708 - protein, 30 aa, Streptomyces mobaraensis
MFEVGSFQEDTGYIGLEGSEPITHSFSKFW

SEQ ID NO: 709 - DNA, 108 bp, Streptomyces leeuwenhoekii; identical to SEQ ID NO: 703
  CDS (1)..(108)

SEQ ID NO: 710 - protein, 36 aa, Streptomyces leeuwenhoekii; identical to SEQ ID NO: 704

SEQ ID NO: 711 - DNA, 141 bp, Streptomyces rimosus
  CDS (1)..(141)
atgcgggaagcgccggaagcgaacgagacggccgagtacgaaccacccgagctggccgaggccggtgctttcgccgagcggacactcggcttcaccggtgaactctccgacggctggggcggccagcacagcaccttctgg

SEQ ID NO: 712 - protein, 47 aa, Streptomyces rimosus
MREAPEANETAEYEPPELAEAGAFAERTLGFTGELSDGWGGQHSTFW

SEQ ID NO: 713 - DNA, 141 bp, Streptomyces sp.
  CDS (1)..(141)
atgcgggaagcgccggaagcgaacgagacggccgagtacgaaccacccgagctggccgacgccggagacttcgccgagcggacgctcggcttccacggtgagctcgccgacagctggggcggcctgcacagcaccttctgg

SEQ ID NO: 714 - protein, 47 aa, Streptomyces sp.
MREAPEANETAEYEPPELADAGDFAERTLGFHGELADSWGGLHSTFW

SEQ ID NO: 715 - DNA, 141 bp, Streptomyces rimosus; identical to SEQ ID NO: 711
  CDS (1)..(141)

SEQ ID NO: 716 - protein, 47 aa, Streptomyces rimosus; identical to SEQ ID NO: 712

SEQ ID NO: 717 - DNA, 108 bp, Streptomyces sp.; identical to SEQ ID NO: 699
  CDS (1)..(108)

SEQ ID NO: 718 - protein, 36 aa, Streptomyces sp.; identical to SEQ ID NO: 700

SEQ ID NO: 719 - DNA, 141 bp, Streptomyces rimosus; identical to SEQ ID NO: 689
  CDS (1)..(141)

SEQ ID NO: 720 - protein, 47 aa, Streptomyces rimosus; identical to SEQ ID NO: 690

SEQ ID NO: 721 - DNA, 108 bp, Streptomyces sp.
  CDS (1)..(108)
atgaagaagacgtacgaggcccccactctggtccgccgcggcggcttccggacaaagaccggcctgctcaggacgaacggcaacgaccgcctcatcctcagcaagaac

SEQ ID NO: 722 - protein, 36 aa, Streptomyces sp.
MKKTYEAPTLVRRGGFRTKTGLLRTNGNDRLILSKN

SEQ ID NO: 723 - DNA, 108 bp, Streptomyces bicolor
  CDS (1)..(108)
atgaagaaggcatacgaagcaccgacgctcgtccggctcggtacgttccgcaaggagacggggctccttcagcgctccggcaacgaccggctgatcttcagcaagaac

SEQ ID NO: 724 - protein, 36 aa, Streptomyces bicolor
MKKAYEAPTLVRLGTFRKETGLLQRSGNDRLIFSKN

SEQ ID NO: 725 - DNA, 102 bp, Streptomyces davawensis
  CDS (1)..(102)
atgtacgagcctccgaccctgatcctggcgggttccttcaggaccctcaccggtctaggcggacgcggtcccaaggacgtgctcttccggcaccagctcctt

SEQ ID NO: 726 - protein, 34 aa, Streptomyces davawensis
MYEPPTLILAGSFRTLTGLGGRGPKDVLFRHQLL

SEQ ID NO: 727 - DNA, 108 bp, Streptomyces scabiei
  CDS (1)..(108)
atgaagaaggcatacgaggcaccgatgctcgtccggctcggcacattccgcaaggagacggggctcctgggacgctccggcaacgaccggctgatcctgagcaagaac

SEQ ID NO: 728 - protein, 36 aa, Streptomyces scabiei
MKKAYEAPMLVRLGTFRKETGLLGRSGNDRLILSKN

SEQ ID NO: 729 - DNA, 135 bp, Streptomyces sp.
  CDS (1)..(135)
atgactgagcagaccgccgagtgcgacgtgtatgagccgccggcgctggtggaggccggtgagttcgcagaggtgaccatgggtgcgcatcaggacggaacctgcgacggtaccggcccgacctactaccgcagc

SEQ ID NO: 730 - protein, 45 aa, Streptomyces sp.
MTEQTAECDVYEPPALVEAGEFAEVTMGAHQDGTCDGTGPTYYRS

SEQ ID NO: 731 - DNA, 108 bp, Streptomyces xinghaiensis; identical to SEQ ID NO: 627
  CDS (1)..(108)

SEQ ID NO: 732 - protein, 36 aa, Streptomyces xinghaiensis; identical to SEQ ID NO: 628

SEQ ID NO: 733 - DNA, 135 bp, Novosphingobium resinovorum
  CDS (1)..(135)
atgaatcgcattgaaccttcggacgaagtcatcgaactcggtgatgctatcgcacagacccggggaccgagcattcccggtcagcccgacaccgaccgtccgctcaatttcgttctcggtctgagcgacgaggat

SEQ ID NO: 734 - protein, 45 aa, Novosphingobium resinovorum
MNRIEPSDEVIELGDAIAQTRGPSIPGQPDTDRPLNFVLGLSDED

SEQ ID NO: 735 - DNA, 135 bp, Novosphingobium resinovorum
  CDS (1)..(135)
atggaacatcaatttgagcacgatgaaatcgaagatttcggcgatgttgtcttcatgactagcggcccgcagatggttgggcatatcgagtccgatagaccggcctactacgtcatcggattcatcgagtgggac

SEQ ID NO: 736 - protein, 45 aa, Novosphingobium resinovorum
MEHQFEHDEIEDFGDVVFMTSGPQMVGHIESDRPAYYVIGFIEWD

SEQ ID NO: 737 - DNA, 135 bp, Novosphingobium resinovorum; identical to SEQ ID NO: 551
  CDS (1)..(135)

SEQ ID NO: 738 - protein, 45 aa, Novosphingobium resinovorum; identical to SEQ ID NO: 552

SEQ ID NO: 739 - DNA, 126 bp, Streptomyces sp.
  CDS (1)..(126)
atggtgtacgaaccgcccgtggtggaggagctcggcggcttcgccgagctgacgctcggtaccagcgtcggcacgttcttcgaaggcggctacgccccctggtactggcagatcccgccgacgggc

SEQ ID NO: 740 - protein, 42 aa, Streptomyces sp.
MVYEPPVVEELGGFAELTLGTSVGTFFEGGYAPWYWQIPPTG

SEQ ID NO: 741 - DNA, 99 bp, Streptomyces cattleya
  CDS (1)..(99)
atgctggtcgaggtcggctccttcgccgagctgacccgttcctaccactggggtgactaccacgactggcaccacggttggtacggctggtgggacgac

SEQ ID NO: 742 - protein, 33 aa, Streptomyces cattleya
MLVEVGSFAELTRSYHWGDYHDWHHGWYGWWDD

SEQ ID NO: 743 - DNA, 108 bp, Streptomyces durhamensis
  CDS (1)..(108)
atgaagaaggcctacgaagcaccgacgctcgtccggctcggctccttccgcaaggagaccggactcctgcagcggcacggcaacgaccggctcatcttcagcaagaac

SEQ ID NO: 744 - protein, 36 aa, Streptomyces durhamensis
MKKAYEAPTLVRLGSFRKETGLLQRHGNDRLIFSKN

SEQ ID NO: 745 - DNA, 132 bp, Sphingomonas wittichii
  CDS (1)..(132)
atggaaaagaccatcgaacatcgtgagaacgatgtgatcgacctcggcgccatcagcgtcgagaccaagggccagggcttcgtcatcgccgacgagagcggacagcgaaatctcctcggcctcaccgacgat

SEQ ID NO: 746 - protein, 44 aa, Sphingomonas wittichii
MEKTIEHRENDVIDLGAISVETKGQGFVIADESGQRNLLGLTDD

SEQ ID NO: 747 - DNA, 141 bp, Streptomyces rimosus; identical to SEQ ID NO: 689
  CDS (1)..(141)

SEQ ID NO: 748 - protein, 47 aa, Streptomyces rimosus; identical to SEQ ID NO: 690

SEQ ID NO: 749 - DNA, 141 bp, Streptomyces rimosus; identical to SEQ ID NO: 689
  CDS (1)..(141)

SEQ ID NO: 750 - protein, 47 aa, Streptomyces rimosus; identical to SEQ ID NO: 690

SEQ ID NO: 751 - DNA, 141 bp, Streptomyces sp.; identical to SEQ ID NO: 713
  CDS (1)..(141)

SEQ ID NO: 752 - protein, 47 aa, Streptomyces sp.; identical to SEQ ID NO: 714

SEQ ID NO: 753 - DNA, 138 bp, Streptomyces lavenduligriseus
  CDS (1)..(138)
atggagaaccgcgaggaggtctacgaggcgccgacgctgagcgaggccggcgacttcgccgaggtcaccctcggctggccgttcggacaccgccgcgacggcggtctcccgccgtactggctctacccctggaccgac

SEQ ID NO: 754 - protein, 46 aa, Streptomyces lavenduligriseus
MENREEVYEAPTLSEAGDFAEVTLGWPFGHRRDGGLPPYWLYPWTD

SEQ ID NO: 755 - DNA, 141 bp, Streptomyces rimosus; identical to SEQ ID NO: 711
  CDS (1)..(141)

SEQ ID NO: 756 - protein, 47 aa, Streptomyces rimosus; identical to SEQ ID NO: 712

SEQ ID NO: 757 - DNA, 120 bp, Sphingobium barthaii
  CDS (1)..(120)
atggaaaccgagagcgacctgatcgaccttggaccggtcacggtcgaaaccaagggcatcgccggcctgtcacgcgatcaggatcagtcgccgaagggcggcgcaggcatcctcgacgat

SEQ ID NO: 758 - protein, 40 aa, Sphingobium barthaii
METESDLIDLGPVTVETKGIAGLSRDQDQSPKGGAGILDD

SEQ ID NO: 759 - DNA, 108 bp, Streptomyces caatingaensis
  CDS (1)..(108)
atggtggaggccggcgaattcgctgagctgaccaggggtgtgccgcagggcaactggccggactacagcgtgatgtggccctggtacccgtcggccggtgcccagggc

SEQ ID NO: 760 - protein, 36 aa, Streptomyces caatingaensis
MVEAGEFAELTRGVPQGNWPDYSVMWPWYPSAGAQG

SEQ ID NO: 761 - DNA, 108 bp, Streptomyces sp.
  CDS (1)..(108)
atgaagaaggcatacgaggcgccgacgctcgtccggctcggtacgttccggaaggagacggggctcctccagcgctccggtcgcgaccggctgatcctgagcaagaac

SEQ ID NO: 762 - protein, 36 aa, Streptomyces sp.
MKKAYEAPTLVRLGTFRKETGLLQRSGRDRLILSKN

SEQ ID NO: 763 - DNA, 108 bp, Streptomyces sp.
  CDS (1)..(108)
atgaagaaggcatacgaagcgccgacactcgtccggctcggtacgttccgcaaggagacggggctcctgggagagcacggcaacgaccggctgatcctgagcaagaac

SEQ ID NO: 764 - protein, 36 aa, Streptomyces sp.
MKKAYEAPTLVRLGTFRKETGLLGEHGNDRLILSKN

SEQ ID NO: 765 - DNA, 129 bp, Sphingomonas parapaucimobilis
  CDS (1)..(129)
atggaacgcgataacgacaaggcacccacgctggtcgatctgggcgatgcccgtgtcctgacccaggggccggccggtaccccgatcgacgaggtccaggggttcctcggcgccggcttggccgacgac

SEQ ID NO: 766 - protein, 43 aa, Sphingomonas parapaucimobilis
MERDNDKAPTLVDLGDARVLTQGPAGTPIDEVQGFLGAGLADD

SEQ ID NO: 767 - DNA, 111 bp, Allokutzneria albata
  CDS (1)..(111)
atgaagaagacatacgagagtccggtgctgcttgaggcaggcactttcgccactgtcaccggccgtcgtggccgctggggtcgcgaccggcgctggcgcaggcgttggtgg

SEQ ID NO: 768 - protein, 37 aa, Allokutzneria albata
MKKTYESPVLLEAGTFATVTGRRGRWGRDRRWRRRWW

SEQ ID NO: 769 - DNA, 105 bp, Streptomyces achromogenes
  CDS (1)..(105)
atgctcagcgaggccggcgacttcgccgaggtcacgctcggctggccgttcggacaccgccgcgacggcggactcccgccgtactggctctacccctacggcgag

SEQ ID NO: 770 - protein, 35 aa, Streptomyces achromogenes
MLSEAGDFAEVTLGWPFGHRRDGGLPPYWLYPYGE

SEQ ID NO: 771 - DNA, 99 bp, Actinopolyspora halophila
  CDS (1)..(99)
atggtcgaggtcggttcgttcaacgaactgaccagggtcaagacctcgggtaactacatagacagtccgtacggcgtctggtgcgtcgggaactgcgga

SEQ ID NO: 772 - protein, 33 aa, Actinopolyspora halophila
MVEVGSFNELTRVKTSGNYIDSPYGVWCVGNCG

SEQ ID NO: 773 - DNA, 111 bp, Streptomyces sp.
  CDS (1)..(111)
atgaagaaggctttctacgagacccctgagttcacggctgcgggctccttccgcagcaagaccggcctggtcgtcatcatccaggccgactggaacgctcccggctggttc

SEQ ID NO: 774 - protein, 37 aa, Streptomyces sp.
MKKAFYETPEFTAAGSFRSKTGLVVIIQADWNAPGWF

SEQ ID NO: 775 - DNA, 108 bp, Streptomyces glaucescens
  CDS (1)..(108)
atgaagaaggcgtacgaggccccgacgctcgtccggctcggatcgttccgccagaagaccggactgctgcagcgccacggcaacgaccgtctgatcctcagcaagaac

SEQ ID NO: 776 - protein, 36 aa, Streptomyces glaucescens
MKKAYEAPTLVRLGSFRQKTGLLQRHGNDRLILSKN

SEQ ID NO: 777 - DNA, 108 bp, Streptomyces sp.; identical to SEQ ID NO: 699
  CDS (1)..(108)

SEQ ID NO: 778 - protein, 36 aa, Streptomyces sp.; identical to SEQ ID NO: 700

SEQ ID NO: 779 - DNA, 123 bp, Nocardiopsis halophila
  CDS (1)..(123)
atgcaggacacccgcccgcgctacatccgccctgttctcacccacctcggcgaattcaaggacgtgacgctcggcggcggctccctccccatctacgacggattcgtcctcggcatcttctac

SEQ ID NO: 780 - protein, 41 aa, Nocardiopsis halophila
MQDTRPRYIRPVLTHLGEFKDVTLGGGSLPIYDGFVLGIFY

SEQ ID NO: 781 - DNA, 126 bp, Amycolatopsis decaplanina
gtgaagggtgtttacgagtcccctgcgctgcaggccgctggggccttctcgaaggtgactggttgcggcaagtgcggctggggtcgtgatcgttactgccggcgcggccaccaccactggtgctgg

SEQ ID NO: 782 - protein, 42 aa, Amycolatopsis decaplanina
MKGVYESPALQAAGAFSKVTGCGKCGWGRDRYCRRGHHHWCW

SEQ ID NO: 783 - DNA, 126 bp, Amycolatopsis decaplanina; identical to SEQ ID NO: 781

SEQ ID NO: 784 - protein, 42 aa, Amycolatopsis decaplanina; identical to SEQ ID NO: 782

SEQ ID NO: 785 - DNA, 105 bp, Streptomyces sp.
  CDS (1)..(105)
atgacgtacgagcgtcccacactgaccaaggccggcagcttccgcaaggtgacgggcatcaagaacaccggccccaaggatgttctcggcggcaagcagctcctc

SEQ ID NO: 786 - protein, 35 aa, Streptomyces sp.
MTYERPTLTKAGSFRKVTGIKNTGPKDVLGGKQLL

SEQ ID NO: 787 - DNA, 123 bp, Nocardiopsis halophila; identical to SEQ ID NO: 779
  CDS (1)..(123)

SEQ ID NO: 788 - protein, 41 aa, Nocardiopsis halophila; identical to SEQ ID NO: 780

SEQ ID NO: 789 - DNA, 111 bp, Streptomyces sp.; identical to SEQ ID NO: 773
  CDS (1)..(111)

SEQ ID NO: 790 - protein, 37 aa, Streptomyces sp.; identical to SEQ ID NO: 774

SEQ ID NO: 791 - DNA, 129 bp, Streptomyces leeuwenhoekii
  CDS (1)..(129)
atggagcacgacgagaagacgccgtacgagacccctgcggtgtacggattgggcgcgttcgccgaggagacgggcctgtacggggtgcgcaacgacgaggagatcaactggcacttcgactactggacc

SEQ ID NO: 792 - protein, 43 aa, Streptomyces leeuwenhoekii
MEHDEKTPYETPAVYGLGAFAEETGLYGVRNDEEINWHFDYWT

SEQ ID NO: 793 - DNA, 141 bp, Streptomyces rimosus; identical to SEQ ID NO: 689
  CDS (1)..(141)

SEQ ID NO: 794 - protein, 47 aa, Streptomyces rimosus; identical to SEQ ID NO: 690

SEQ ID NO: 795 - DNA, 129 bp, Streptomyces leeuwenhoekii; identical to SEQ ID NO: 791
  CDS (1)..(129)

SEQ ID NO: 796 - protein, 43 aa, Streptomyces leeuwenhoekii; identical to SEQ ID NO: 792

SEQ ID NO: 797 - DNA, 105 bp, Streptomyces caatingaensis
  CDS (1)..(105)
atgacgtacgagcgtcccaccgtcgccaaggccggcagcttccgcaaggtgaccggcatcaagaacaccggcccgaaggacgtgctcggcggcaagcagctcctc

SEQ ID NO: 798 - protein, 35 aa, Streptomyces caatingaensis
MTYERPTVAKAGSFRKVTGIKNTGPKDVLGGKQLL

SEQ ID NO: 799 - DNA, 141 bp, Nonomuraea candida
  CDS (1)..(141)
atggagaacgtccacgaccgcccgcagagcccctatgagccgcccgtgatccaggaggccggcggcttcgccggcgtcacccacggccccggcctcgggggcgaccctgacaccttcacttactacttcgacttcggcaac

SEQ ID NO: 800 - protein, 47 aa, Nonomuraea candida
MENVHDRPQSPYEPPVIQEAGGFAGVTHGPGLGGDPDTFTYYFDFGN

SEQ ID NO: 801 - DNA, 147 bp, Asticcacaulis sp.
  CDS (1)..(147)
atgcgtaccaatgacaagcccgtcgactatgctccgctggtcgaagacatcatcgaactgggcaccgccagcgtcgaaacgcaaggtggcgcccaaggcggcccggagccgtcggaccagcagaaccgcatgggtatttccgaagac

SEQ ID NO: 802 - protein, 49 aa, Asticcacaulis sp.
MRTNDKPVDYAPLVEDIIELGTASVETQGGAQGGPEPSDQQNRMGISED

SEQ ID NO: 803 - DNA, 135 bp, Streptomyces albus
  CDS (1)..(135)
atgcagaacaccgacatctacgaacccccggtcctcatcgaggccggcgggttcatggagctgaccctcggcgcggagaagggcggcatcaccgacttcgcgggatggttcgacatcttcgctgacttccagggc

SEQ ID NO: 804 - protein, 45 aa, Streptomyces albus
MQNTDIYEPPVLIEAGGFMELTLGAEKGGITDFAGWFDIFADFQG

SEQ ID NO: 805 - DNA, 90 bp, Streptomyces sp.
  CDS (1)..(90)
atgatcgagtgtggctccttccaggaggacaccggctacttcgggctgaccggctacgagaaccttttccacttctacgacaagctccac

SEQ ID NO: 806 - protein, 30 aa, Streptomyces sp.
MIECGSFQEDTGYFGLTGYENLFHFYDKLH

SEQ ID NO: 807 - DNA, 105 bp, Streptomyces sp.
  CDS (1)..(105)
atgctgagcgaggccggtgacttcaccgaggtcaccctcggctggccgtggggcgaccgctacgacggcggactgccgccgtactggcgtttcccctacggcggc

SEQ ID NO: 808 - protein, 35 aa, Streptomyces sp.
MLSEAGDFTEVTLGWPWGDRYDGGLPPYWRFPYGG

SEQ ID NO: 809 - DNA, 96 bp, Streptomyces bingchenggensis; identical to SEQ ID NO: 159
  CDS (1)..(96)

SEQ ID NO: 810 - protein, 32 aa, Streptomyces bingchenggensis; identical to SEQ ID NO: 160

SEQ ID NO: 811 - DNA, 132 bp, Streptomyces bingchenggensis; identical to SEQ ID NO: 161
  CDS (1)..(132)

SEQ ID NO: 812 - protein, 44 aa, Streptomyces bingchenggensis; identical to SEQ ID NO: 162

SEQ ID NO: 813 - DNA, 135 bp, Erythrobacter citreus
  CDS (1)..(135)
atgaaggatttcgaacataatgagaatgaggtcattgacctcggaaaggcctcggtggagaccaagggcaacgccctgttcgatatcgatgtgagcagcggccggctgtcttacgcgactggcctcgccgaaggc

SEQ ID NO: 814 - protein, 45 aa, Erythrobacter citreus
MKDFEHNENEVIDLGKASVETKGNALFDIDVSSGRLSYATGLAEG

SEQ ID NO: 815 - DNA, 105 bp, Streptomyces roseoverticillatus
  CDS (1)..(105)
atgacgtatgagcgtcccaccctcgccaaggccggcagcttccgcaaggtgacgggcctcaaggaccacggcccgaaggacgtcctgggcggcaagcaggttctc

SEQ ID NO: 816 - protein, 35 aa, Streptomyces roseoverticillatus
MTYERPTLAKAGSFRKVTGLKDHGPKDVLGGKQVL

SEQ ID NO: 817 - DNA, 132 bp, Streptomyces natalensis
  CDS (1)..(132)
atggaggagccggccgtggagccggtgaccacgtcgtacgagccgccgatggtgacggaggccggtgccttcgccgaggtgacccgcggcggcattggcacgttcaaggaagcgggggttggccgcttcatg

SEQ ID NO: 818 - protein, 44 aa, Streptomyces natalensis
MEEPAVEPVTTSYEPPMVTEAGAFAEVTRGGIGTFKEAGVGRFM

SEQ ID NO: 819 - DNA, 129 bp, Sphingopyxis sp.; identical to SEQ ID NO: 539
  CDS (1)..(129)

SEQ ID NO: 820 - protein, 43 aa, Sphingopyxis sp.; identical to SEQ ID NO: 540

SEQ ID NO: 821 - DNA, 117 bp, Actinomadura atramentaria
  CDS (1)..(117)
atgcaggcgtacgaaccgcccgcgctcgtcgagatcggcgacctccgcgaggtcacgctgggcaagggcacctggggctgggacaacgccaaccagtgcctgtggctgcactgcgtc

SEQ ID NO: 822 - protein, 39 aa, Actinomadura atramentaria
MQAYEPPALVEIGDLREVTLGKGTWGWDNANQCLWLHCV

SEQ ID NO: 823 - DNA, 132 bp, Streptomyces natalensis; identical to SEQ ID NO: 817
  CDS (1)..(132)

SEQ ID NO: 824 - protein, 44 aa, Streptomyces natalensis; identical to SEQ ID NO: 818

SEQ ID NO: 825 - DNA, 147 bp, Streptomyces aurantiacus
gtgatcgctgtgagcgaggcactgaagaacatcgagatcgaggatgtctacgagccgccgctgctcgtcgaggcgggggagtacgccgaggcgacgcagggcagcatcggcaggttccccgaggtctcgttcaactggtggcctttc

SEQ ID NO: 826 - protein, 49 aa, Streptomyces aurantiacus
MIAVSEALKNIEIEDVYEPPLLVEAGEYAEATQGSIGRFPEVSFNWWPF

SEQ ID NO: 827 - DNA, 147 bp, Streptomyces aurantiacus; identical to SEQ ID NO: 825

SEQ ID NO: 828 - protein, 49 aa, Streptomyces aurantiacus; identical to SEQ ID NO: 826

SEQ ID NO: 829 - DNA, 126 bp, Paenibacillus polymyxa
  CDS (1)..(126)
atgagtaaaaaagaatggcaggaaccgacgattgaggtgctggatattaaccagactatggcgggtaaaggctggaaacagattgattgggtgtcagatcatgatgccgatctgtataatcccagc

SEQ ID NO: 830 - protein, 42 aa, Paenibacillus polymyxa
MSKKEWQEPTIEVLDINQTMAGKGWKQIDWVSDHDADLYNPS

SEQ ID NO: 831 - DNA, 126 bp, Paenibacillus polymyxa; identical to SEQ ID NO: 829
  CDS (1)..(126)

SEQ ID NO: 832 - protein, 42 aa, Paenibacillus polymyxa; identical to SEQ ID NO: 830

SEQ ID NO: 833 - DNA, 111 bp, Klebsiella variicola
  CDS (1)..(111)
atgaaaaaagtgactcttaaaaaactcaataagagagccagcaaagttacgcgtggatctgatggcccaatcattgagttctttaatccgaacggagttatgcactacggc

SEQ ID NO: 834 - protein, 37 aa, Klebsiella variicola
MKKVTLKKLNKRASKVTRGSDGPIIEFFNPNGVMHYG

SEQ ID NO: 835 - DNA, 111 bp, Klebsiella variicola; identical to SEQ ID NO: 833
  CDS (1)..(111)

SEQ ID NO: 836 - protein, 37 aa, Klebsiella variicola; identical to SEQ ID NO: 834

SEQ ID NO: 837 - DNA, 126 bp, Paenibacillus polymyxa; identical to SEQ ID NO: 829
  CDS (1)..(126)

SEQ ID NO: 838 - protein, 42 aa, Paenibacillus polymyxa; identical to SEQ ID NO: 830

SEQ ID NO: 839 - DNA, 138 bp, Streptomyces megasporus
  CDS (1)..(138)
atgaacgagcacgaagccagggagaccgagccccgtgaagattacgcggctccgcagttggtggagctgggcgcggttccggcggtgacgctcggcaggtacgccgaggacagccaggaccagggccgctacttcgaa

SEQ ID NO: 840 - protein, 46 aa, Streptomyces megasporus
MNEHEARETEPREDYAAPQLVELGAVPAVTLGRYAEDSQDQGRYFE

SEQ ID NO: 841 - DNA, 150 bp, Mesorhizobium ciceri
  CDS (1)..(150)
atggaacagaatgttgaaaagcatgaatacgaaacgccaagcctgacggtccatggttcgattgagaccatcacccagggcggcggcggcagcacggcgatcgacgcatcgttccccgcgcatacgccgatcggcgacctgacgttctcc

SEQ ID NO: 842 - protein, 50 aa, Mesorhizobium ciceri
MEQNVEKHEYETPSLTVHGSIETITQGGGGSTAIDASFPAHTPIGDLTFS

SEQ ID NO: 843 - DNA, 150 bp, Mesorhizobium ciceri; identical to SEQ ID NO: 841
  CDS (1)..(150)

SEQ ID NO: 844 - protein, 50 aa, Mesorhizobium ciceri; identical to SEQ ID NO: 842

SEQ ID NO: 845 - DNA, 150 bp, Mesorhizobium sp.
  CDS (1)..(150)
atggaacagaatgttgagaagcaggagtacgaaacccccagcctgacggtgcatggttcgattgaaacgatcacgcagggcggtgctggcacgacggcgcttgacgcgagctttcccgcgcacacgccggtcggcgagctgactttctct

SEQ ID NO: 846 - protein, 50 aa, Mesorhizobium sp.
MEQNVEKQEYETPSLTVHGSIETITQGGAGTTALDASFPAHTPVGELTFS

SEQ ID NO: 847 - DNA, 138 bp, Sphingomonas sp.
  CDS (1)..(138)
atgcccaaaactgaatatgagacgcccgaactgatcgatgcgggcctgttcgaggagatcaccgagggcggagccaacggctcggtcctcgacgccagcttctccgcagggaccccggtctccgacctgaccttttcc

SEQ ID NO: 848 - protein, 46 aa, Sphingomonas sp.
MPKTEYETPELIDAGLFEEITEGGANGSVLDASFSAGTPVSDLTFS

SEQ ID NO: 849 - DNA, 150 bp, Mesorhizobium sp.
  CDS (1)..(150)
atggaacagaatgttgaaaagcatgagtacgagacccccagcctgacggttcacggttcgattgaatccatcacgcagggcggtgctggcacgacggcgcttgacgcgagctttcccgcgcacacgccggtcggcgagctgactttctct

SEQ ID NO: 850 - protein, 50 aa, Mesorhizobium sp.
MEQNVEKHEYETPSLTVHGSIESITQGGAGTTALDASFPAHTPVGELTFS

SEQ ID NO: 851 - DNA, 138 bp, Sphingomonas sp.; identical to SEQ ID NO: 847
  CDS (1)..(138)

SEQ ID NO: 852 - protein, 46 aa, Sphingomonas sp.; identical to SEQ ID NO: 848

SEQ ID NO: 853 - DNA, 150 bp, Mesorhizobium plurifarium
  CDS (1)..(150)
atggaacagaatgttgaaaagcatgagtatgaaacccccagcctgacggttcacggttcgattgaaacgatcacgcagggcggtgctggcacgacggcgcttgacgcgagctttcccgcgcacacgccggtcggcgagctgaccttctct

SEQ ID NO: 854 - protein, 50 aa, Mesorhizobium plurifarium
MEQNVEKHEYETPSLTVHGSIETITQGGAGTTALDASFPAHTPVGELTFS

SEQ ID NO: 855 - DNA, 126 bp, Paenibacillus polymyxa; identical to SEQ ID NO: 829
  CDS (1)..(126)

SEQ ID NO: 856 - protein, 42 aa, Paenibacillus polymyxa; identical to SEQ ID NO: 830

SEQ ID NO: 857 - DNA, 123 bp, Paenibacillus sonchi
  CDS (1)..(123)
atgaaaaaggaatacagcaagcctgcattggaagtactcgatgtgaaaatgactatggctggacctggtgttgctatcgtcgacgcgttccaagatgatccggatgaagtacaacactactcc

SEQ ID NO: 858 - protein, 41 aa, Paenibacillus sonchi
MKKEYSKPALEVLDVKMTMAGPGVAIVDAFQDDPDEVQHYS

SEQ ID NO: 859 - DNA, 123 bp, Paenibacillus sonchi; identical to SEQ ID NO: 857
  CDS (1)..(123)

SEQ ID NO: 860 - protein, 41 aa, Paenibacillus sonchi; identical to SEQ ID NO: 858

SEQ ID NO: 861 - DNA, 150 bp, Mesorhizobium sp.
  CDS (1)..(150)
atggaacagaatgttgagaagcaagagtacgagacccccagcctgacggttcacggttcgatcgaaacgatcacgcagggtgcctcgggcacgacggctcttgacgcggcatttcccgcgcatacgccgatcggcgacctcaccttctcc

SEQ ID NO: 862 - protein, 50 aa, Mesorhizobium sp.
MEQNVEKQEYETPSLTVHGSIETITQGASGTTALDAAFPAHTPIGDLTFS

SEQ ID NO: 863 - DNA, 138 bp, Sphingomonas sp.; identical to SEQ ID NO: 847
  CDS (1)..(138)

SEQ ID NO: 864 - protein, 46 aa, Sphingomonas sp.; identical to SEQ ID NO: 848

SEQ ID NO: 865 - DNA, 195 bp, Calothrix sp.
  CDS (1)..(195)
atgaaaacagcatacagctcaccaagactaatcaatcacggtaatgtaagtcaagttacccaagccaaccttgccaacaaaacaagtgacttactttttggaacagtacaaggtactgttcctggtaatggtggctccctagatgcttgcatctttcctaaaaacgattcaagatgcaaaggtgcaaatctgaac

SEQ ID NO: 866 - protein, 65 aa, Calothrix sp.
MKTAYSSPRLINHGNVSQVTQANLANKTSDLLFGTVQGTVPGNGGSLDACIFPKNDSRCKGANLN

SEQ ID NO: 867 - DNA, 138 bp, Sphingomonas sp.; identical to SEQ ID NO: 847
  CDS (1)..(138)

SEQ ID NO: 868 - protein, 46 aa, Sphingomonas sp.; identical to SEQ ID NO: 848

SEQ ID NO: 869 - DNA, 141 bp, Frankia sp.
  CDS (1)..(141)
atggtgacggttgacctccagtcgcacgagggtccggcggaaaaggatccggtgctgctggtgtgcctcggtgaggcgtcgatggtgacactcggccagggcaagggcagcgcggaggacaagcggaaggcgtataacagc

SEQ ID NO: 870 - protein, 47 aa, Frankia sp.
MVTVDLQSHEGPAEKDPVLLVCLGEASMVTLGQGKGSAEDKRKAYNS

SEQ ID NO: 871 - DNA, 150 bp, Mesorhizobium amorphae
  CDS (1)..(150)
atggaacagaatgttgaaaagcatgaatacgaaacgcctagcctgacggtccacggttcgatcgagaccatcacgcaaggcggcggcggctcgacggcgctcgacgcgtcgttccccgcgcatacgccgatcggcgaactcacgttctcc

SEQ ID NO: 872 - protein, 50 aa, Mesorhizobium amorphae
MEQNVEKHEYETPSLTVHGSIETITQGGGGSTALDASFPAHTPIGELTFS

SEQ ID NO: 873 - DNA, 156 bp, Pseudonocardia acaciae
  CDS (1)..(156)
atggcgcatcaacaggatttcgagtcgagtgcgggtggcgccggatgggtccatccgttgatcgaggaggtcggcacgatcgtggacatcacgctcggccggtgtgccgggaacaccctggatggctaccagtactggcgttgctgttggtctgcc

SEQ ID NO: 874 - protein, 52 aa, Pseudonocardia acaciae
MAHQQDFESSAGGAGWVHPLIEEVGTIVDITLGRCAGNTLDGYQYWRCCWSA

SEQ ID NO: 875 - DNA, 195 bp, Pseudonocardia acaciae
gtggggtggccgcgcccgtcagcgcgggcgggcgcggccaccagaacactgggccggcaatcagatggcgacgcagcagaagcagtacctgctgccgccgtcctgttggaggccgtagttcccaccgagggtgatgtcgacgaccgttccgacctcctcgatcgacggtcgaacccactccaccgacgcgtcagc

SEQ ID NO: 876 - protein, 65 aa, Pseudonocardia acaciae
MGWPRPSARAGAATRTLGRQSDGDAAEAVPAAAVLLEAVVPTEGDVDDRSDLLDRRSNPLHRRVS

SEQ ID NO: 877 - DNA, 159 bp, Pseudonocardia acaciae
  CDS (1)..(159)
atggagaaaaaccaacacgccaagttagctgacgcgtcggtggagtgggttcgaccgtcgatcgaggaggtcggaacggtcgtcgacatcaccctcggtgggaactacggcctccaacaggacggcggcagcaggtactgcttctgctgcgtcgccatc

SEQ ID NO: 878 - protein, 53 aa, Pseudonocardia acaciae
MEKNQHAKLADASVEWVRPSIEEVGTVVDITLGGNYGLQQDGGSRYCFCCVAI

SEQ ID NO: 879 - DNA, 126 bp, Paenibacillus polymyxa; identical to SEQ ID NO: 829
  CDS (1)..(126)

SEQ ID NO: 880 - protein, 42 aa, Paenibacillus polymyxa; identical to SEQ ID NO: 830

SEQ ID NO: 881 - DNA, 81 bp, Rhodobacter sphaeroides
  CDS (1)..(81)
atgacccatggtgcgaccgacggctgggccctcgacgcctcgttcccggtggacactcccaagggcgacctgaccttctcc

SEQ ID NO: 882 - protein, 27 aa, Rhodobacter sphaeroides
MTHGATDGWALDASFPVDTPKGDLTFS

SEQ ID NO: 883 - DNA, 81 bp, Rhodobacter sphaeroides; identical to SEQ ID NO: 881
  CDS (1)..(81)

SEQ ID NO: 884 - protein, 27 aa, Rhodobacter sphaeroides
MTHGATDGWALDASFPVDTPKGDLTFS

SEQ ID NO: 885 - DNA, 141 bp, Bacillus firmus
  CDS (1)..(141)
atgtcagaaaaaaaagatgttaaaattgaatactccacgccaaaatttgtagagtacggaagtgctgttgatttaactaaaggaagccttcagtcacagttagcagaaggcactgatccttggactggctatcgtcgttct

SEQ ID NO: 886 - protein, 47 aa, Bacillus firmus
MSEKKDVKIEYSTPKFVEYGSAVDLTKGSLQSQLAEGTDPWTGYRRS

SEQ ID NO: 887 - DNA, 81 bp, Rhodobacter sphaeroides; identical to SEQ ID NO: 881
  CDS (1)..(81)

SEQ ID NO: 888 - protein, 27 aa, Rhodobacter sphaeroides
MTHGATDGWALDASFPVDTPKGDLTFS

SEQ ID NO: 889 - DNA, 162 bp, Dyadobacter crusticola
  CDS (1)..(162)
atgaaattttttacctccacagaatcaggttcattacccaagaaatcctatcaaaagccgcggcttaaaaaattgggcagcgtcgtacaacttacaaagttgggtaagctggggtcgcagttcgacgccaatgagcccactagcaataatttttctgacgat

SEQ ID NO: 890 - protein, 54 aa, Dyadobacter crusticola
MKFFTSTESGSLPKKSYQKPRLKKLGSVVQLTKLGKLGSQFDANEPTSNNFSDD

SEQ ID NO: 891 - DNA, 150 bp, Mesorhizobium ciceri; identical to SEQ ID NO: 841
  CDS (1)..(150)

SEQ ID NO: 892 - protein, 50 aa, Mesorhizobium ciceri; identical to SEQ ID NO: 842

SEQ ID NO: 893 - DNA, 117 bp, Paenibacillus dauci
  CDS (1)..(117)
atgcaatggcaagcaccaaccttggaagttttggatgtacatcaaacagcggcaggtaaaggctggagagtcatcgactgggttacttatgacgatgcggatctgtacaacccgagc

SEQ ID NO: 894 - protein, 39 aa, Paenibacillus dauci
MQWQAPTLEVLDVHQTAAGKGWRVIDWVTYDDADLYNPS

SEQ ID NO: 895 - DNA, 120 bp, Paenibacillus wulumuqiensis
  CDS (1)..(120)
atgcaatggcaagctccagcgctggaagttttggaaatgaacgaaactgcggcaggtaaaggctggaaagcaattgactgggtcacttatgatgacgcagacctgtacaatccaggcagc

SEQ ID NO: 896 - protein, 40 aa, Paenibacillus wulumuqiensis
MQWQAPALEVLEMNETAAGKGWKAIDWVTYDDADLYNPGS

SEQ ID NO: 897 - DNA, 99 bp, Paenibacillus wulumuqiensis
  CDS (1)..(99)
atgcaggtcctggatgtgaatgagactgcagctggtaaaggctggagagtcattgactgggttacttacgatgatgctgatctgtacaacccgggcagc

SEQ ID NO: 898 - protein, 33 aa, Paenibacillus wulumuqiensis
MQVLDVNETAAGKGWRVIDWVTYDDADLYNPGS

SEQ ID NO: 899 - DNA, 102 bp, Paenibacillus wulumuqiensis
  CDS (1)..(102)
atgttggaagttttggatgtcaatgaaacagcagctggtaaaggctggaaagtcattgactgggttacttacgatgatgctgacctgtacaacccaggtagc

SEQ ID NO: 900 - protein, 34 aa, Paenibacillus wulumuqiensis
MLEVLDVNETAAGKGWKVIDWVTYDDADLYNPGS

SEQ ID NO: 901 - DNA, 126 bp, Nocardiopsis kunsanensis
  CDS (1)..(126)
atggacgcttcggtcattcccgtccctctcgacacggacgagtccgtcatcgacctcggcgacgccgccgacctgaccctcggcgagggcagcgcccgcaacgagaacaagcgcaacccgtacaac

SEQ ID NO: 902 - protein, 42 aa, Nocardiopsis kunsanensis
MDASVIPVPLDTDESVIDLGDAADLTLGEGSARNENKRNPYN

SEQ ID NO: 903 - DNA, 123 bp, Bacillus manliponensis
  CDS (1)..(123)
atgaaagaacaatgggaaaaaccagaattagaaatacttactattcatatgacaatggctggaccaggattgagaattgctgatgccgaacagactgatccagacgaagatgttcactatagt

SEQ ID NO: 904 - protein, 41 aa, Bacillus manliponensis
MKEQWEKPELEILTIHMTMAGPGLRIADAEQTDPDEDVHYS

SEQ ID NO: 905 - DNA, 198 bp, Verrucomicrobium sp.
  CDS (1)..(198)
atgaagagcaatagggataggggaaatcgggaactcaaccagtcggcggtccttgggaaggatgggcggcggaagccctacgaggcgccgcgcctggtcgtccttggtacggtcgaagagctcacgaaggccaagggccttcttttgaccgatacggctcttaccggaagcaccgttacgaccgtgaccgtcctcggc

SEQ ID NO: 906 - protein, 66 aa, Verrucomicrobium sp.
MKSNRDRGNRELNQSAVLGKDGRRKPYEAPRLVVLGTVEELTKAKGLLLTDTALTGSTVTTVTVLG

SEQ ID NO: 907 - DNA, 129 bp, Paenibacillus sp.
  CDS (1)..(129)
atgagtaaaaaagaatggcaggaaccgacgatagaggtgctggacattaaccagaccatggcggggaaaggctggaaacagattgattgggtgtccgaccacgatgccgatctttataatccaccaagc

SEQ ID NO: 908 - protein, 43 aa, Paenibacillus sp.
MSKKEWQEPTIEVLDINQTMAGKGWKQIDWVSDHDADLYNPPS

SEQ ID NO: 909 - DNA, 111 bp, Streptomyces ochraceiscleroticus
  CDS (1)..(111)
atgcgcctgcgttacacgcctccgaaagtcgtccgaatcggacgagtcgagaagttgaccgggcaactgcggcggggtacccccgacgtgctcggccacggcaacctggcc

SEQ ID NO: 910 - protein, 37 aa, Streptomyces ochraceiscleroticus
MRLRYTPPKVVRIGRVEKLTGQLRRGTPDVLGHGNLA

SEQ ID NO: 911 - DNA, 138 bp, Risungbinella massiliensis
  CDS (1)..(138)
atggaaaaccaaaaacaagaaaagaaagagtacacatcgccaaacttaatcgtacttggcaacatcgtagagattacttttggtggcgctggtggacacgacacagacacctactctaccaaatacccacgtagcgaa

SEQ ID NO: 912 - protein, 46 aa, Risungbinella massiliensis
MENQKQEKKEYTSPNLIVLGNIVEITFGGAGGHDTDTYSTKYPRSE

SEQ ID NO: 913 - DNA, 96 bp, Risungbinella massiliensis
  CDS (1)..(96)
atgctattcgctacgtgggtatttggtagagtaggtgtctgtgtcgtgtccaccagcgccaccaaaagtaatctctacgatgttgccaagtacgat

SEQ ID NO: 914 - protein, 32 aa, Risungbinella massiliensis
MLFATWVFGRVGVCVVSTSATKSNLYDVAKYD

SEQ ID NO: 915 - DNA, 123 bp, Paenibacillus sonchi; identical to SEQ ID NO: 857
  CDS (1)..(123)

SEQ ID NO: 916 - protein, 41 aa, Paenibacillus sonchi; identical to SEQ ID NO: 858

SEQ ID NO: 917 - DNA, 126 bp, Paenibacillus polymyxa
  CDS (1)..(126)
atgagtaaaaaagaatggcaggaaccgacgatagaggtgctggatattaaccagactatggcgggtaaaggctggaaacagattgactgggtatctgaccacgatgccgatcttcataatccaagc

SEQ ID NO: 918 - protein, 42 aa, Paenibacillus polymyxa
MSKKEWQEPTIEVLDINQTMAGKGWKQIDWVSDHDADLHNPS

SEQ ID NO: 919 - DNA, 126 bp, Paenibacillus polymyxa; identical to SEQ ID NO: 829
  CDS (1)..(126)

SEQ ID NO: 920 - protein, 42 aa, Paenibacillus polymyxa; identical to SEQ ID NO: 830

SEQ ID NO: 921 - DNA, 126 bp, Paenibacillus polymyxa; identical to SEQ ID NO: 829
  CDS (1)..(126)

SEQ ID NO: 922 - protein, 42 aa, Paenibacillus polymyxa; identical to SEQ ID NO: 830

SEQ ID NO: 923 - DNA, 147 bp, Sphingopyxis fribergensis
  CDS (1)..(147)
atgcatacacttccgaaatcggcttatgcgaagccggaactcgtcgaagtcggttctttcgaggacgtgacgctcggcggcagctcggggtccaatctggacgccgattttccctcggggaccccgtttagcgatctcaccttctcc

SEQ ID NO: 924 - protein, 49 aa, Sphingopyxis fribergensis
MHTLPKSAYAKPELVEVGSFEDVTLGGSSGSNLDADFPSGTPFSDLTFS

SEQ ID NO: 925 - DNA, 141 bp, Sphingopyxis fribergensis
  CDS (1)..(141)
atggagggtatccatgcatacacttccgaaatcggcttatgcgaagccggaactcgtcgaagtcggttctttcgaggacgtgacgctcggcggcagctcggggtccaatctggacgccgattttccctcggggaccccgtt

SEQ ID NO: 926 - protein, 47 aa, Sphingopyxis fribergensis
MEGIHAYTSEIGLCEAGTRRSRFFRGRDARRQLGVQSGRRFSLGDPV

SEQ ID NO: 927 - DNA, 126 bp, Paenibacillus sp.
  CDS (1)..(126)
atgagcaaaaaagaatggcaggaaccaacgatagaggtactggatattaaccagaccatggcaggtaaaggctggaaaaatattgattgggtgtccgacttcgatgccgatctttataatccaagc

SEQ ID NO: 928 - protein, 42 aa, Paenibacillus sp.
MSKKEWQEPTIEVLDINQTMAGKGWKNIDWVSDFDADLYNPS

SEQ ID NO: 929 - DNA, 147 bp, Sphingopyxis fribergensis; identical to SEQ ID NO: 923
  CDS (1)..(147)

SEQ ID NO: 930 - protein, 49 aa, Sphingopyxis fribergensis; identical to SEQ ID NO: 924

SEQ ID NO: 931 - DNA, 141 bp, Sphingopyxis fribergensis; identical to SEQ ID NO: 925
  CDS (1)..(141)

SEQ ID NO: 932 - protein, 47 aa, Sphingopyxis fribergensis; identical to SEQ ID NO: 926

SEQ ID NO: 933 - DNA, 105 bp, Corynebacterium minutissimum
  CDS (1)..(105)
atggtgccgacgctgaccatgttgggtcggttcagcgcggcaacacgtggtgctgccataccttggttagaaactacgctcgtcacgcataacagtatggccggt

SEQ ID NO: 934 - protein, 35 aa, Corynebacterium minutissimum
MVPTLTMLGRFSAATRGAAIPWLETTLVTHNSMAG

SEQ ID NO: 935 - DNA, 123 bp, Paenibacillus wynnii
  CDS (1)..(123)
atgaaaaaagaatacagcagaccttctctcgaagtgttggatgtaaacatgaccctgttgggtcctggtaaagcaaaaccggattccgttcaggatgatccggatgaaatcgtaaacttctcc

SEQ ID NO: 936 - protein, 41 aa, Paenibacillus wynnii
MKKEYSRPSLEVLDVNMTLLGPGKAKPDSVQDDPDEIVNFS

SEQ ID NO: 937 - DNA, 126 bp, Paenibacillus sp.
  CDS (1)..(126)
atgagtaaaaaagaatggcaggagcccaccatagaggtgctggatattaaccagacgatggcaggtaagggctggaaagaaattgactgggtatctgatcacgacgctgacctggttaatccaagc

SEQ ID NO: 938 - protein, 42 aa, Paenibacillus sp.
MSKKEWQEPTIEVLDINQTMAGKGWKEIDWVSDHDADLVNPS

SEQ ID NO: 939 - DNA, 150 bp, Pseudanabaena sp.
  CDS (1)..(150)
atgattggcaaaaacaacaaaaagacttattcagccatcaaaatttctaaattgggttccgttgcggcaatgactcaagccatgaatacaggcgcatatggagactttgctcgcctgagtatggcaatgaggatgatgatggtggatgga

SEQ ID NO: 940 - protein, 50 aa, Pseudanabaena sp.
MIGKNNKKTYSAIKISKLGSVAAMTQAMNTGAYGDFARLSMAMRMMMVDG

SEQ ID NO: 941 - DNA, 138 bp, Sphingobium yanoikuyae
  CDS (1)..(138)
atggaaaaggagtcttatgaatcgcccgagctcgtcgaactcggctcgttcgaatcgctgacgcagggcacgtcctatggcgaaagcctggacgcgaccttcccggacggtacgccgcgcggcgagctcacgttctcc

SEQ ID NO: 942 - protein, 46 aa, Sphingobium yanoikuyae
MEKESYESPELVELGSFESLTQGTSYGESLDATFPDGTPRGELTFS

SEQ ID NO: 943 - DNA, 126 bp, Paenibacillus polymyxa
  CDS (1)..(126)
atgagtaaaaaagaatggcaggaaccgacgatagaggtgctggatattagccagaccatggcggggaaaggctggagacagattgattgggtgtccgaccacgatgccgatatttataatccaagc

SEQ ID NO: 944 - protein, 42 aa, Paenibacillus polymyxa
MSKKEWQEPTIEVLDISQTMAGKGWRQIDWVSDHDADIYNPS

SEQ ID NO: 945 - DNA, 126 bp, Paenibacillus polymyxa; identical to SEQ ID NO: 917
  CDS (1)..(126)

SEQ ID NO: 946 - protein, 42 aa, Paenibacillus polymyxa; identical to SEQ ID NO: 918

SEQ ID NO: 947 - DNA, 177 bp, Sulfurovum sp.
  CDS (1)..(177)
atgatagaaaaaaaccattcggatttctcaggagaaacagagagacaaaagaaaccgtattcttctccgaaaatagaaataatagcgaatgtgagaatggcaacaaaaggatccacaataggcggtactgatagtggtgggcaaagtgccaatgttccgtcagatccaggtggctgg

SEQ ID NO: 948 - protein, 59 aa, Sulfurovum sp.
MIEKNHSDFSGETERQKKPYSSPKIEIIANVRMATKGSTIGGTDSGGQSANVPSDPGGW

SEQ ID NO: 949 - DNA, 126 bp, Paenibacillus polymyxa; identical to SEQ ID NO: 917
  CDS (1)..(126)

SEQ ID NO: 950 - protein, 42 aa, Paenibacillus polymyxa; identical to SEQ ID NO: 918

SEQ ID NO: 951 - DNA, 150 bp, Mesorhizobium plurifarium; identical to SEQ ID NO: 853
  CDS (1)..(150)

SEQ ID NO: 952 - protein, 50 aa, Mesorhizobium plurifarium; identical to SEQ ID NO: 854

SEQ ID NO: 953 - DNA, 126 bp, Chitinophaga pinensis
  CDS (1)..(126)
atgaaaaacgaaacaactcaacaaaagaccacatgggagacacctgatatgacagtgcttccgattaatgacgttacacttggcgcaggtgcggccggtactgactttgcgtccgaaataagtgtc

SEQ ID NO: 954 - protein, 42 aa, Chitinophaga pinensis
MKNETTQQKTTWETPDMTVLPINDVTLGAGAAGTDFASEISV

SEQ ID NO: 955 - DNA, 132 bp, Chitinophaga pinensis
  CDS (1)..(132)
atgaaaaacaacacatcacaacaaccacttacctgggaaacccctgatatgatcgtactccccattgataaggttacactcggcaaagctggatccggttcagattttgcagctgaatgggaagtcagtacc

SEQ ID NO: 956 - protein, 44 aa, Chitinophaga pinensis
MKNNTSQQPLTWETPDMIVLPIDKVTLGKAGSGSDFAAEWEVST

SEQ ID NO: 957 - DNA, 105 bp, Sphingomonas sp.
  CDS (1)..(105)
atggaggtaggatcgtttgaggcggtgacgcagggtggtgccgacggcaccgtgctggacgcgtcattctcctccggaacgccggtttcggatctgactttttcc

SEQ ID NO: 958 - protein, 35 aa, Sphingomonas sp.
MEVGSFEAVTQGGADGTVLDASFSSGTPVSDLTFS

SEQ ID NO: 959 - DNA, 180 bp, Streptomyces roseoverticillatus
  CDS (1)..(180)
atggagagcacgcacgacccgatcacgccggcgaccgaccactccgcgaccgtccagcgctcccgcaccgtcaagcgcccttacgtggaaccgcagatcgacgagctcggcaccgtcgagcacctcactgcccacggcggcatcctccttcccgactcgccgaacagccgcacgctcctc

SEQ ID NO: 960 - protein, 60 aa, Streptomyces roseoverticillatus
MESTHDPITPATDHSATVQRSRTVKRPYVEPQIDELGTVEHLTAHGGILLPDSPNSRTLL

SEQ ID NO: 961 - DNA, 99 bp, Paenibacillus dauci
  CDS (1)..(99)
atgcaggtcctggatgttaatgagacagcagctggtaaaggctggaaagtcattgactgggttacttacgatgacgccgatctgtacaacccgggcagc

SEQ ID NO: 962 - protein, 33 aa, Paenibacillus dauci
MQVLDVNETAAGKGWKVIDWVTYDDADLYNPGS

SEQ ID NO: 963 - DNA, 117 bp, Paenibacillus dauci; identical to SEQ ID NO: 893
  CDS (1)..(117)

SEQ ID NO: 964 - protein, 39 aa, Paenibacillus dauci; identical to SEQ ID NO: 894

SEQ ID NO: 965 - DNA, 99 bp, Paenibacillus dauci
  CDS (1)..(99)
atggaagttttggaaatgaacgaaactgccgcaggtaaaggctggaaagcaattgactgggtcacttatgatgacgcagacctgtacaacccaggtagc

SEQ ID NO: 966 - protein, 33 aa, Paenibacillus dauci
MEVLEMNETAAGKGWKAIDWVTYDDADLYNPGS

SEQ ID NO: 967 - DNA, 120 bp, Paenibacillus dauci
  CDS (1)..(120)
atgcaatggcaagctccaacgttggaagttttggatgtcaatgaaacagcagcaggtaaaggctggaaagtcattgactgggttacttatgatgatgctgatctgtacaacccaggcagc

SEQ ID NO: 968 - protein, 40 aa, Paenibacillus dauci
MQWQAPTLEVLDVNETAAGKGWKVIDWVTYDDADLYNPGS

SEQ ID NO: 969 - DNA, 132 bp, Clostridium butyricum
  CDS (1)..(132)
atgaaaaaagagtggaatgatccaaaattagtagaattatcagtgcaacatacagaacaaagtcctagttggttaactaataaggatggagaatttgttgatgctaatgggaattattgggaaagtagaagc

SEQ ID NO: 970 - protein, 44 aa, Clostridium butyricum
MKKEWNDPKLVELSVQHTEQSPSWLTNKDGEFVDANGNYWESRS

SEQ ID NO: 971 - DNA, 108 bp, Streptomyces peruviensis
  CDS (1)..(108)
atgcagaagtacacggcacctaccatcatttgcctggggcggatcgaggaactgaccgggcagcttcgtcgtggagttcctgacctcctcggtcacggcaacattctg

SEQ ID NO: 972 - protein, 36 aa, Streptomyces peruviensis
MQKYTAPTIICLGRIEELTGQLRRGVPDLLGHGNIL

SEQ ID NO: 973 - DNA, 126 bp, Paenibacillus polymyxa; identical to SEQ ID NO: 917
  CDS (1)..(126)

SEQ ID NO: 974 - protein, 42 aa, Paenibacillus polymyxa; identical to SEQ ID NO: 918

SEQ ID NO: 975 - DNA, 126 bp, Paenibacillus polymyxa; identical to SEQ ID NO: 943
  CDS (1)..(126)

SEQ ID NO: 976 - protein, 42 aa, Paenibacillus polymyxa; identical to SEQ ID NO: 944

SEQ ID NO: 977 - DNA, 138 bp, Sphingobium yanoikuyae; identical to SEQ ID NO: 941
  CDS (1)..(138)

SEQ ID NO: 978 - protein, 46 aa, Sphingobium yanoikuyae; identical to SEQ ID NO: 942

SEQ ID NO: 979 - DNA, 126 bp, Paenibacillus polymyxa; identical to SEQ ID NO: 917
  CDS (1)..(126)

SEQ ID NO: 980 - protein, 42 aa, Paenibacillus polymyxa; identical to SEQ ID NO: 918

SEQ ID NO: 981 - DNA, 150 bp, Mesorhizobium plurifarium
  CDS (1)..(150)
atggaacagaatgttcaaaagcatgagtatgagacccccagcctgacggttcacggttcgattgaaacgatcacgcagggcggtgctggcacgacggcgcttgacgcgagctttcccgcgcacacgccggtcggcgagctgaccttctct

SEQ ID NO: 982 - protein, 50 aa, Mesorhizobium plurifarium
MEQNVQKHEYETPSLTVHGSIETITQGGAGTTALDASFPAHTPVGELTFS

SEQ ID NO: 983 - DNA, 129 bp, Paenibacillus sp.; identical to SEQ ID NO: 907
  CDS (1)..(129)

SEQ ID NO: 984 - protein, 43 aa, Paenibacillus sp.; identical to SEQ ID NO: 908

SEQ ID NO: 985 - DNA, 123 bp, Streptomyces caatingaensis
  CDS (1)..(123)
atggccgtcgaagccctggacgtctacgagcccccgctgctggccgaggccggcgactacaccgaactcacgcagggattcgggtacttcgcgtgcgagggcgagtacgggtacttcggatac

SEQ ID NO: 986 - protein, 41 aa, Streptomyces caatingaensis
MAVEALDVYEPPLLAEAGDYTELTQGFGYFACEGEYGYFGY

SEQ ID NO: 987 - DNA, 135 bp, Nonomuraea candida
  CDS (1)..(135)
atgcaggacggacggagcacgcaggacgagtacgaggcccccgcgctggaggaactcggctccttccaggagctgaccgggtatgtggggctgcgcaacagagagtcgctcctcggctatccccgcaacatctgg

SEQ ID NO: 988 - protein, 45 aa, Nonomuraea candida
MQDGRSTQDEYEAPALEELGSFQELTGYVGLRNRESLLGYPRNIW

SEQ ID NO: 989 - DNA, 105 bp, Streptomyces sp.; identical to SEQ ID NO: 785
  CDS (1)..(105)

SEQ ID NO: 990 - protein, 35 aa, Streptomyces sp.; identical to SEQ ID NO: 786

SEQ ID NO: 991 - DNA, 117 bp, Streptomyces lavendulae
  CDS (1)..(117)
atgatcaagaagatctacgaggttcccgtcttctccgccgcgggctccttccgcgccgacaccggaatgggtctcccggccggctcctgggactggaagggcattcgcggtttcatt

SEQ ID NO: 992 - protein, 39 aa, Streptomyces lavendulae
MIKKIYEVPVFSAAGSFRADTGMGLPAGSWDWKGIRGFI

SEQ ID NO: 993 - DNA, 123 bp, Streptomyces caatingaensis; identical to SEQ ID NO: 985
  CDS (1)..(123)

SEQ ID NO: 994 - protein, 41 aa, Streptomyces caatingaensis; identical to SEQ ID NO: 986

SEQ ID NO: 995 - DNA, 105 bp, Streptomyces rimosus
  CDS (1)..(105)
atgacgtacgagcgccccacactcaccaaggccggcggcttccgcaaggtgacgggcgtcaagaacaccggtcccaaggatgttctcggcggcaagcagctcctc

SEQ ID NO: 996 - protein, 35 aa, Streptomyces rimosus
MTYERPTLTKAGGFRKVTGVKNTGPKDVLGGKQLL

SEQ ID NO: 997 - DNA, 105 bp, Streptomyces rimosus; identical to SEQ ID NO: 995
  CDS (1)..(105)

SEQ ID NO: 998 - protein, 35 aa, Streptomyces rimosus; identical to SEQ ID NO: 996

SEQ ID NO: 999 - DNA, 105 bp, Streptomyces rimosus; identical to SEQ ID NO: 995
  CDS (1)..(105)

SEQ ID NO: 1000 - protein, 35 aa, Streptomyces rimosus; identical to SEQ ID NO: 996

SEQ ID NO: 1001 - DNA, 105 bp, Streptomyces sp.
  CDS (1)..(105)
atggcctacgaacgccccactctcaccaaggtcggcgacttccagaaggtcaccggactggccggccagggcagccccgaccttctgggcggccacagcctgctc

SEQ ID NO: 1002 - protein, 35 aa, Streptomyces sp.
MAYERPTLTKVGDFQKVTGLAGQGSPDLLGGHSLL

SEQ ID NO: 1003 - DNA, 105 bp, Streptomyces rimosus; identical to SEQ ID NO: 995
  CDS (1)..(105)

SEQ ID NO: 1004 - protein, 35 aa, Streptomyces rimosus; identical to SEQ ID NO: 996

SEQ ID NO: 1005 - DNA, 105 bp, Streptomyces rimosus; identical to SEQ ID NO: 995
  CDS (1)..(105)

SEQ ID NO: 1006 - protein, 35 aa, Streptomyces rimosus; identical to SEQ ID NO: 996

SEQ ID NO: 1007 - DNA, 105 bp, Streptomyces rimosus; identical to SEQ ID NO: 995
  CDS (1)..(105)

SEQ ID NO: 1008 - protein, 35 aa, Streptomyces rimosus; identical to SEQ ID NO: 996

SEQ ID NO: 1009 - DNA, 105 bp, Streptomyces rimosus; identical to SEQ ID NO: 995
  CDS (1)..(105)

SEQ ID NO: 1010 - protein, 35 aa, Streptomyces rimosus; identical to SEQ ID NO: 996

SEQ ID NO: 1011 - DNA, 105 bp, Streptomyces rimosus; identical to SEQ ID NO: 995
  CDS (1)..(105)

SEQ ID NO: 1012 - protein, 35 aa, Streptomyces rimosus; identical to SEQ ID NO: 996

SEQ ID NO: 1013 - DNA, 105 bp, Streptomyces sp.
  CDS (1)..(105)
atgacgtacgagcgccccaccctcaccaaggccggcagcttccgcaaggtgaccgggatcaaggacaacgggcccaaggacatcctcggcggcaagcagattctc

SEQ ID NO: 1014 - protein, 35 aa, Streptomyces sp.
MTYERPTLTKAGSFRKVTGIKDNGPKDILGGKQIL

SEQ ID NO: 1015 - DNA, 147 bp, Asticcacaulis excentricus
  CDS (1)..(147)
atgaccaagcgtacgaccatcgccgcccgccgcgtgggactgatcgatctcggcaaggccacccgccagaccaagggtctgacgcaaatccaggccctcgacagcgtgtctggccagttccgcgaccagctgggtctgtcggcggac

SEQ ID NO: 1016 - protein, 49 aa, Asticcacaulis excentricus
MTKRTTIAARRVGLIDLGKATRQTKGLTQIQALDSVSGQFRDQLGLSAD

SEQ ID NO: 1017 - DNA, 147 bp, Asticcacaulis excentricus
  CDS (1)..(147)
atgcgtacttataatcgcagccttcccgcccgcgcgggtctgaccgacctcggcaaggtcaccactcacacaaaggggccgacccccatggttgggcttgatagcgtgagcggccaatactgggatcagcacgccccgctggcggac

SEQ ID NO: 1018 - protein, 49 aa, Asticcacaulis excentricus
MRTYNRSLPARAGLTDLGKVTTHTKGPTPMVGLDSVSGQYWDQHAPLAD

SEQ ID NO: 1019 - DNA, 105 bp, Streptomyces rimosus
  CDS (1)..(105)
atgacgtacgagcgccccacactcaccagggccggcggcttccgcaaggtgacgggtgtcaagaacaccggccccaaggatgttctcggcggcaagcagctcctc

SEQ ID NO: 1020 - protein, 35 aa, Streptomyces rimosus
MTYERPTLTRAGGFRKVTGVKNTGPKDVLGGKQLL

SEQ ID NO: 1021 - DNA, 105 bp, Streptomyces toyocaensis
  CDS (1)..(105)
atggcttacgagcgtcccactctcaccaaggtcggcgacttccagaaggtcacgggcctggccgggacgggcagccccgacctgctgggcggccacagcctgctc

SEQ ID NO: 1022 - protein, 35 aa, Streptomyces toyocaensis
MAYERPTLTKVGDFQKVTGLAGTGSPDLLGGHSLL

SEQ ID NO: 1023 - DNA, 117 bp, Novosphingobium sp.
  CDS (1)..(117)
atggaacgtgaagacgaagtgatcgacctcggcaccgcaaccatcgaaaccaagggcggcgccggcctggtgatcgattccaagaacagccagcagcttttcggcattgccgaagac

SEQ ID NO: 1024 - protein, 39 aa, Novosphingobium sp.
MEREDEVIDLGTATIETKGGAGLVIDSKNSQQLFGIAED

SEQ ID NO: 1025 - DNA, 105 bp, Streptomyces rimosus; identical to SEQ ID NO: 995
  CDS (1)..(105)

SEQ ID NO: 1026 - protein, 35 aa, Streptomyces rimosus; identical to SEQ ID NO: 996

SEQ ID NO: 1027 - DNA, 105 bp, Streptomyces rimosus; identical to SEQ ID NO: 995
  CDS (1)..(105)

SEQ ID NO: 1028 - protein, 35 aa, Streptomyces rimosus; identical to SEQ ID NO: 996

SEQ ID NO: 1029 - DNA, 105 bp, Streptomyces rimosus; identical to SEQ ID NO: 995
  CDS (1)..(105)

SEQ ID NO: 1030 - protein, 35 aa, Streptomyces rimosus; identical to SEQ ID NO: 996

SEQ ID NO: 1031 - DNA, 117 bp, Kitasatospora sp.
  CDS (1)..(117)
atgaccgacgacgtgtacgagcccccggtgatgatcgaactcggcgacttcgcggacctcacccggggcttcgacatcggcaaccagtccgacgtccacggctactacctcgccccc

SEQ ID NO: 1032 - protein, 39 aa, Kitasatospora sp.
MTDDVYEPPVMIELGDFADLTRGFDIGNQSDVHGYYLAP

SEQ ID NO: 1033 - DNA, 108 bp, Nocardia transvalensis
  CDS (1)..(108)
atgtacgaaccaccccttctggtggagatcgggaagttcaccgaactgactcgcgggtcgagctacgtgataatcgagggctacccgagcgcgtgggggtcgaactac

SEQ ID NO: 1034 - protein, 36 aa, Nocardia transvalensis
MYEPPLLVEIGKFTELTRGSSYVIIEGYPSAWGSNY

SEQ ID NO: 1035 - DNA, 120 bp, Nonomuraea candida
  CDS (1)..(120)
atgcgcgaccacatcgcgtacgagtccccggccatcaccgagctgggcgacttcgccgcagagaccggcgtggggctcggcgacgagtacgagccctcgtggccgatcgccgaccggccg

SEQ ID NO: 1036 - protein, 40 aa, Nonomuraea candida
MRDHIAYESPAITELGDFAAETGVGLGDEYEPSWPIADRP

SEQ ID NO: 1037 - DNA, 129 bp, Nonomuraea candida
  CDS (1)..(129)
atgcgcgaccacatcgtgtacgagtccccggccatcaccgagctgggtggcttcggcacggagaccggcgagttcgtcggcccgtgcgaggagacctggctgccgttcaacgactactcctgccccgcg

SEQ ID NO: 1038 - protein, 43 aa, Nonomuraea candida
MRDHIVYESPAITELGGFGTETGEFVGPCEETWLPFNDYSCPA

SEQ ID NO: 1039 - DNA, 135 bp, Novosphingobium subterraneum
  CDS (1)..(135)
atgacccaagacacgccccgcgaggacaccctgatcgatctgggtgaagcctcgaccacaaccaagggccaggcaatcgtcgaactcgacgtcagcggtggcaacctccggttcctcccgggcatcgctgccgag

SEQ ID NO: 1040 - protein, 45 aa, Novosphingobium subterraneum
MTQDTPREDTLIDLGEASTTTKGQAIVELDVSGGNLRFLPGIAAE

SEQ ID NO: 1041 - DNA, 123 bp, Streptomyces sp.
  CDS (1)..(123)
atggaggatgcggagtcctacgagccgccgcgggtgaccgaggccggtgacttcaccgaggtcaccctcggggggttcggcacccgcgccgatgggggcgcgccgccgttccagacgtggggc

SEQ ID NO: 1042 - protein, 41 aa, Streptomyces sp.
MEDAESYEPPRVTEAGDFTEVTLGGFGTRADGGAPPFQTWG

SEQ ID NO: 1043 - DNA, 123 bp, Streptomyces sp.; identical to SEQ ID NO: 1041
  CDS (1)..(123)

SEQ ID NO: 1044 - protein, 41 aa, Streptomyces sp.; identical to SEQ ID NO: 1042

SEQ ID NO: 1045 - DNA, 105 bp, Streptomyces rimosus; identical to SEQ ID NO: 1019
  CDS (1)..(105)

SEQ ID NO: 1046 - protein, 35 aa, Streptomyces rimosus; identical to SEQ ID NO: 1020

SEQ ID NO: 1047 - DNA, 105 bp, Streptomyces rimosus; identical to SEQ ID NO: 1019
  CDS (1)..(105)

SEQ ID NO: 1048 - protein, 35 aa, Streptomyces rimosus; identical to SEQ ID NO: 1020

SEQ ID NO: 1049 - DNA, 120 bp, Thermobifida fusca
  CDS (1)..(120)
atggaaaagaagaagtacaccgctccgcagctcgctaaggtcggcgaattcaaggaggccaccggctggtacaccgcggaatggggcctcgagctgatcttcgtcttcccgcgcttcatc

SEQ ID NO: 1050 - protein, 40 aa, Thermobifida fusca
MEKKKYTAPQLAKVGEFKEATGWYTAEWGLELIFVFPRFI

SEQ ID NO: 1051 - DNA, 135 bp, Streptomyces sp.; identical to SEQ ID NO: 729
  CDS (1)..(135)

SEQ ID NO: 1052 - protein, 45 aa, Streptomyces sp.; identical to SEQ ID NO: 730

SEQ ID NO: 1053 - DNA, 123 bp, Streptomyces lavenduligriseus
  CDS (1)..(123)
atggacaaccaggaagtgacgggtgaggagtacgagtccccgatgatggtcgaactcggggagttcgccgagctgacgaacggcatcggttcccggacctgggacagcatctggctgtgggac

SEQ ID NO: 1054 - protein, 41 aa, Streptomyces lavenduligriseus
MDNQEVTGEEYESPMMVELGEFAELTNGIGSRTWDSIWLWD

SEQ ID NO: 1055 - DNA, 129 bp, Sphingobium chlorophenolicum
  CDS (1)..(129)
atggaacgcaacgacgaacggcatgacgacctgatcgacctcggcgccgccagcaccgagacccagggccggcccgggcttcagctcgagttcggcgtgatcgcccagcccatcggcatcgaggccgag

SEQ ID NO: 1056 - protein, 43 aa, Sphingobium chlorophenolicum
MERNDERHDDLIDLGAASTETQGRPGLQLEFGVIAQPIGIEAE

SEQ ID NO: 1057 - DNA, 132 bp, Novosphingobium sp.
  CDS (1)..(132)
atggaacgtgaaacccagcacatcgaagagggtgtgatcgaactcggcgcggtcagcgagcgcaccgagggcaacggcgacgttgccgccgaccaggtcggtcttcggatccagaccggcatttccgacgac

SEQ ID NO: 1058 - protein, 44 aa, Novosphingobium sp.
MERETQHIEEGVIELGAVSERTEGNGDVAADQVGLRIQTGISDD

SEQ ID NO: 1059 - DNA, 132 bp, Novosphingobium malaysiense
  CDS (1)..(132)
atggaacgtgaaacccagcacatcgaagagggtgtgatcgaactcggcgcggtcagcgaacgcaccgagggcaacggcgacgttgctgccgaccaggtcggtcttcggatccagaccggcatttccgacaac

SEQ ID NO: 1060 - protein, 44 aa, Novosphingobium malaysiense
MERETQHIEEGVIELGAVSERTEGNGDVAADQVGLRIQTGISDN

SEQ ID NO: 1061 - DNA, 120 bp, Thermobifida fusca; identical to SEQ ID NO: 1049
  CDS (1)..(120)

SEQ ID NO: 1062 - protein, 40 aa, Thermobifida fusca; identical to SEQ ID NO: 1050

SEQ ID NO: 1063 - DNA, 123 bp, Streptomyces sp.; identical to SEQ ID NO: 1041
  CDS (1)..(123)

SEQ ID NO: 1064 - protein, 41 aa, Streptomyces sp.; identical to SEQ ID NO: 1042

SEQ ID NO: 1065 - DNA, 129 bp, Sphingobium xenophagum
  CDS (1)..(129)
atggaacgcgacaaccatctggaagccgacctggtcgacctgggatcggtgaccgagcagacgaagggcaacaacggcgtcgacatcgaccaggctcagcagcggctgcagtccgggctttccgacgac

SEQ ID NO: 1066 - protein, 43 aa, Sphingobium xenophagum
MERDNHLEADLVDLGSVTEQTKGNNGVDIDQAQQRLQSGLSDD

SEQ ID NO: 1067 - DNA, 135 bp, Citromicrobium sp.
  CDS (1)..(135)
atgaaggagttcgaccataaccagaatgaggttatcgacctcggcaaggcctcggttgagaccaagggcgccgtcggtttctacatcgacgccagcggcgggcaattggccaacagcccgggcctgctcgacgaa

SEQ ID NO: 1068 - protein, 45 aa, Citromicrobium sp.
MKEFDHNQNEVIDLGKASVETKGAVGFYIDASGGQLANSPGLLDE

SEQ ID NO: 1069 - DNA, 135 bp, Asticcacaulis benevestitus
  CDS (1)..(135)
atggaaaagattgaaacccacgaagacctgatcgacctcggcgccgcttcgtcggaaaccaagggcgtcggcttcggccgtcccgacagcatcctgacgcaggaacaagcgaagccgatgggccttgatcgcgat

SEQ ID NO: 1070 - protein, 45 aa, Asticcacaulis benevestitus
MEKIETHEDLIDLGAASSETKGVGFGRPDSILTQEQAKPMGLDRD

SEQ ID NO: 1071 - DNA, 105 bp, Streptomyces rimosus; identical to SEQ ID NO: 995
  CDS (1)..(105)

SEQ ID NO: 1072 - protein, 35 aa, Streptomyces rimosus; identical to SEQ ID NO: 996

SEQ ID NO: 1073 - DNA, 114 bp, Streptomyces sp.
  CDS (1)..(114)
atgtactccaagcctaccctgctgaaggttggtgagttttccaagctcacgatgcacagccgtcctcgtcgtaaggacaagggacaccgtcggcgccccaaggggattttcctc

SEQ ID NO: 1074 - protein, 38 aa, Streptomyces sp.
MYSKPTLLKVGEFSKLTMHSRPRRKDKGHRRRPKGIFL

SEQ ID NO: 1075 - DNA, 105 bp, Streptomyces rimosus; identical to SEQ ID NO: 995
  CDS (1)..(105)

SEQ ID NO: 1076 - protein, 35 aa, Streptomyces rimosus; identical to SEQ ID NO: 996

SEQ ID NO: 1077 - DNA, 135 bp, Citromicrobium sp.; identical to SEQ ID NO: 1067
  CDS (1)..(135)

SEQ ID NO: 1078 - protein, 45 aa, Citromicrobium sp.; identical to SEQ ID NO: 1068

SEQ ID NO: 1079 - DNA, 135 bp, Unknown
  Description of Unknown: Sphingomonas-like bacterium sequence
  CDS (1)..(135)
atggaacgcgatgacgaacgcctcgacaatgaggtcatcgatctcggctcggtcatcaccgagacgaagggcggcgtgcagggcttcgacgatacgccctcgggcctgcgcatcaagatgggcctcaccaacgat

SEQ ID NO: 1080 - protein, 45 aa, Unknown
  Description of Unknown: Sphingomonas-like bacterium sequence
MERDDERLDNEVIDLGSVITETKGGVQGFDDTPSGLRIKMGLTND

SEQ ID NO: 1081 - DNA, 126 bp, Streptomyces achromogenes
  CDS (1)..(126)
atggagaagaaccccgaagtggcgggtgaggagtacgagtccccgatcatggtcgaactcggggagttcacggagctgaccaacggcatcggttcccagacctgggacaccatctggctgtgggac

SEQ ID NO: 1082 - protein, 42 aa, Streptomyces achromogenes
MEKNPEVAGEEYESPIMVELGEFTELTNGIGSQTWDTIWLWD

SEQ ID NO: 1083 - DNA, 114 bp, Amycolatopsis azurea
  CDS (1)..(114)
atgtattcgaagccgaccttgctcaagctcggttctttcgagcggctgaccaagcacagccgtccggccaaaaaggacaaggccggacgtcggcgtccgcgtcacgtcctgctc

SEQ ID NO: 1084 - protein, 38 aa, Amycolatopsis azurea
MYSKPTLLKLGSFERLTKHSRPAKKDKAGRRRPRHVLL

SEQ ID NO: 1085 - DNA, 117 bp, Novosphingobium lindaniclasticum
  CDS (1)..(117)
atggaacggaatgacgatgtgatcgagctgggcaccgccagcatcgaaacccagggcctcggcggccagaaccccgatgtgggcattggccaggaggtcgctggtctctccaacgac

SEQ ID NO: 1086 - protein, 39 aa, Novosphingobium lindaniclasticum
MERNDDVIELGTASIETQGLGGQNPDVGIGQEVAGLSND

SEQ ID NO: 1087 - DNA, 129 bp, Asticcacaulis sp.
  CDS (1)..(129)
atgaccaaaattgaacctcaagacgtcatcgaccttggcgccgcaagcgccgagaccaagggcatgcagacccagttccaggctgatgacgcgcttcagcacaagccgaaccctggcctcagccatgac

SEQ ID NO: 1088 - protein, 43 aa, Asticcacaulis sp.
MTKIEPQDVIDLGAASAETKGMQTQFQADDALQHKPNPGLSHD

SEQ ID NO: 1089 - DNA, 135 bp, Asticcacaulis sp.
  CDS (1)..(135)
atgaccaagttcgatcatgaaaccgaagacctcatcgacctgggccacgcttcggtcgaaaccaagggcaatcaaacgatctacgcgcccgacgaggtcgcccagcacctgcggcaacccggtctgagcaacgac

SEQ ID NO: 1090 - protein, 45 aa, Asticcacaulis sp.
MTKFDHETEDLIDLGHASVETKGNQTIYAPDEVAQHLRQPGLSND

SEQ ID NO: 1091 - DNA, 129 bp, Sphingobium sp.
  CDS (1)..(129)
atgaaccacgaacatgagacggacgatctgatcgaactcggcaatgcgagcaccgacacgaagggcggtgccttcatcgtcgaggacaatgaagggagcctcagtctccagacgggcctcaccgacgac

SEQ ID NO: 1092 - protein, 43 aa, Sphingobium sp.
MNHEHETDDLIELGNASTDTKGGAFIVEDNEGSLSLQTGLTDD

SEQ ID NO: 1093 - DNA, 135 bp, Novosphingobium sp.
  CDS (1)..(135)
atggaaaagaccattgataccctcgaagacaaagtcgtcgatctcggctcggtgactgaagaaacccgcggcatcgtgggtgcactcgaagaccagcagggcggccaacgtgctgctcttggcctcaccgacgac

SEQ ID NO: 1094 - protein, 45 aa, Novosphingobium sp.
MEKTIDTLEDKVVDLGSVTEETRGIVGALEDQQGGQRAALGLTDD

SEQ ID NO: 1095 - DNA, 135 bp, Novosphingobium malaysiense
  CDS (1)..(135)
atggaacgtgaagaaaccggccgcgaagacgacggcacgatcgagctgggcgctgtcagcgtggaaacctgcggcggcatcggcccgcagttcgacctccagctccaccagcccgtcgccggcattctcgacgac

SEQ ID NO: 1096 - protein, 45 aa, Novosphingobium malaysiense
MEREETGREDDGTIELGAVSVETCGGIGPQFDLQLHQPVAGILDD

SEQ ID NO: 1097 - DNA, 114 bp, Caulobacter sp.
  CDS (1)..(114)
atgtcggcgatccgcaaagtccgtttcgtcaagctcggcgacgccaagcgcctgacccatgggggtggggaccacggcgtcgactggctggcccagccgatggagccgcaaggc

SEQ ID NO: 1098 - protein, 38 aa, Caulobacter sp.
MSAIRKVRFVKLGDAKRLTHGGGDHGVDWLAQPMEPQG

SEQ ID NO: 1099 - DNA, 114 bp, Caulobacter sp.
  CDS (1)..(114)
atgaccaagacccgcaagttccgcctggttcgcctcggcgacgccaaggtcctgacccagggccagggcgaccagaacttcgagatcaacaccctgcccggcaaggacgtcggc

SEQ ID NO: 1100 - protein, 38 aa, Caulobacter sp.
MTKTRKFRLVRLGDAKVLTQGQGDQNFEINTLPGKDVG

SEQ ID NO: 1101 - DNA, 138 bp, Sphingobium japonicum
  CDS (1)..(138)
atggatcgtcatgacaactccgaggtcgatgagatcatcgacctcggcaccgccagcgccgttacccaggggatgggaagcggctcgaccgatcagaacggtcagcccaaaaacctgatcggcggcatttctgacgac

SEQ ID NO: 1102 - protein, 46 aa, Sphingobium japonicum
MDRHDNSEVDEIIDLGTASAVTQGMGSGSTDQNGQPKNLIGGISDD

SEQ ID NO: 1103 - DNA, 117 bp, Sphingomonas sanxanigenens
  CDS (1)..(117)
atggaacgcaacgacgacgtgatcgaactcggcaccgccagcgtcgagacgatgggtcccggcggccagcccgccgatgaattcctcggccaggaccagacgggcctcaccgacgac

SEQ ID NO: 1104 - protein, 39 aa, Sphingomonas sanxanigenens
MERNDDVIELGTASVETMGPGGQPADEFLGQDQTGLTDD

SEQ ID NO: 1105 - DNA, 129 bp, Sphingomonas paucimobilis
  CDS (1)..(129)
atggaacgcaccgaagtaaccgaggaggtcatcgacctcggcacaatcgtcgaacaaacgcacggctcagccgtcaatttcgccgacaccgatggcgggcagcgtatcctgcccggcctctccgacgat

SEQ ID NO: 1106 - protein, 43 aa, Sphingomonas paucimobilis
MERTEVTEEVIDLGTIVEQTHGSAVNFADTDGGQRILPGLSDD

SEQ ID NO: 1107 - DNA, 99 bp, Sphingobium sp.
  CDS (1)..(99)
atgatcgaccttggcgcaatcagcgtcgagacgaagggcccgggccttggccagggtgacgagatcgggctgcagaacccggtcggcctttccgacgac

SEQ ID NO: 1108 - protein, 33 aa, Sphingobium sp.
MIDLGAISVETKGPGLGQGDEIGLQNPVGLSDD

SEQ ID NO: 1109 - DNA, 117 bp, Streptomyces ruber
  CDS (1)..(117)
atgtccaaggagaaatacgaagccccgacggttgtcgaactgggctacttcggcgaggagacaggattcatcggcccgatccactatgaaggaattcttctgtggcactcctggttc

SEQ ID NO: 1110 - protein, 39 aa, Streptomyces ruber
MSKEKYEAPTVVELGYFGEETGFIGPIHYEGILLWHSWF

SEQ ID NO: 1111 - DNA, 141 bp, Asticcacaulis benevestitus
  CDS (1)..(141)
atgaaaactttgatcgcatccgcccgcaaggccggcacaacgcacctcggcgccttcaccaagcaaaccaagggcggcggccagtaccacaaggccgacgaaacctcggaatttcgccccaacccgatgctgtcgaacgac

SEQ ID NO: 1112 - protein, 47 aa, Asticcacaulis benevestitus
MKTLIASARKAGTTHLGAFTKQTKGGGQYHKADETSEFRPNPMLSND

SEQ ID NO: 1113 - DNA, 132 bp, Sphingobium sp.
  CDS (1)..(132)
atggaacgcaacgatgatcgcaacgtcgatgaactgatcgacctcgggtcggtcacagaagaaaccaagggccccggcatcggcggcaacgacggcgctggcgagcaggtcctgatgggcctcaccgacgaa

SEQ ID NO: 1114 - protein, 44 aa, Sphingobium sp.
MERNDDRNVDELIDLGSVTEETKGPGIGGNDGAGEQVLMGLTDE

SEQ ID NO: 1115 - DNA, 126 bp, Streptomyces sp.
  CDS (1)..(126)
atgctggagaacaccgggaccgaggacgtctacgagccgccgctgctggccgaggtcgggccgtacgccgaggtgacgcagggcgccttcggggactggcctgacttcccggtcggcttttggctc

SEQ ID NO: 1116 - protein, 42 aa, Streptomyces sp.
MLENTGTEDVYEPPLLAEVGPYAEVTQGAFGDWPDFPVGFWL

SEQ ID NO: 1117 - DNA, 222 bp, Actinobaculum sp.
  CDS (1)..(222)
atgtacgccactcttgtcgatttctattctctggagacaagcgtccgcaagacgctgaccgtcgcaaccgcgacggtcgagaaaaccatccaagaaaagaggaatatcatttctcaggatgtttacgaggctccggccatgctcaaggtcggcggcttcgacgagctcaccaacgccacccgcaggggctactgggttgacttcctgggcggttggtggttc

SEQ ID NO: 1118 - protein, 74 aa, Actinobaculum sp.
MYATLVDFYSLETSVRKTLTVATATVEKTIQEKRNIISQDVYEAPAMLKVGGFDELTNATRRGYWVDFLGGWWF

SEQ ID NO: 1119 - DNA, 105 bp, Kribbella catacumbae
  CDS (1)..(105)
atgcgtgagtacgagcgcccgacggtgatcgaggccggcgacttcggtcaggagaccgctggttccggtggccacaactgggagtggatcgacgcctggggttgg

SEQ ID NO: 1120 - protein, 35 aa, Kribbella catacumbae
MREYERPTVIEAGDFGQETAGSGGHNWEWIDAWGW

SEQ ID NO: 1121 - DNA, 93 bp, Streptomyces sp.; identical to SEQ ID NO: 541
  CDS (1)..(93)

SEQ ID NO: 1122 - protein, 31 aa, Streptomyces sp.; identical to SEQ ID NO: 542

SEQ ID NO: 1123 - DNA, 117 bp, Sphingobium lactosutens
  CDS (1)..(117)
atgctcgaagacgaagccatcgagctgggcatcgccagcgtcgagacgaaaggcaacggccttcgcgtcatcgacggcatctcgacgctgcagccgctcgccggcatttccgacgac

SEQ ID NO: 1124 - protein, 39 aa, Sphingobium lactosutens
MLEDEAIELGIASVETKGNGLRVIDGISTLQPLAGISDD

SEQ ID NO: 1125 - DNA, 147 bp, Streptomyces rubellomurinus
  CDS (1)..(147)
atggagaacacctccgtggagactctggagctccaggcctacgagacccccgaggtcttcgaggccggttccttcgccgaggacaccggcgcgctcggccttcacggcgccgagccgttcttcccgaccctgcacaccagctggtgg

SEQ ID NO: 1126 - protein, 49 aa, Streptomyces rubellomurinus
MENTSVETLELQAYETPEVFEAGSFAEDTGALGLHGAEPFFPTLHTSWW

SEQ ID NO: 1127 - DNA, 111 bp, Sphingomonas sp.
  CDS (1)..(111)
atgaaacgcctcgatctgggcggggtcatgcagcagaccaaaggcggggctatgtcggtcaacgacaaccagaacgggctgcgcccgatcttcggcgggctttccgccgac

SEQ ID NO: 1128 - protein, 37 aa, Sphingomonas sp.
MKRLDLGGVMQQTKGGAMSVNDNQNGLRPIFGGLSAD

SEQ ID NO: 1129 - DNA, 105 bp, Actinomadura oligospora
  CDS (1)..(105)
atggacacctacgagcgtcctacgttgacagagctcggcggtttcgaagaagagaccgacggagaaatgggaacactcctcgagttcatcctggaacgagactcc

SEQ ID NO: 1130 - protein, 35 aa, Actinomadura oligospora
MDTYERPTLTELGGFEEETDGEMGTLLEFILERDS

SEQ ID NO: 1131 - DNA, 141 bp, Streptomyces varsoviensis
  CDS (1)..(141)
atgagcgagacgctgcccatcgagcccgccgacgtccgcgagaccccgctgccggtcgagaccggcgagttcgtggaactcactcgggagcgagggggcgggacgcccgagggcaatggcccgcgcttccccttctggggg

SEQ ID NO: 1132 - protein, 47 aa, Streptomyces varsoviensis
MSETLPIEPADVRETPLPVETGEFVELTRERGGGTPEGNGPRFPFWG

SEQ ID NO: 1133 - DNA, 99 bp, Sphingobium yanoikuyae
  CDS (1)..(99)
atgatcgatctcggccacgcgagcgccgaaacgcagggcatcggcctggtcgatcgggacaaccccgccggtcagcagcagaccggcattctcgacgaa

SEQ ID NO: 1134 - protein, 33 aa, Sphingobium yanoikuyae
MIDLGHASAETQGIGLVDRDNPAGQQQTGILDE

SEQ ID NO: 1135 - DNA, 99 bp, Sphingobium yanoikuyae; identical to SEQ ID NO: 1133
  CDS (1)..(99)

SEQ ID NO: 1136 - protein, 33 aa, Sphingobium yanoikuyae; identical to SEQ ID NO: 1134

SEQ ID NO: 1137 - DNA, 117 bp, Streptomyces ruber; identical to SEQ ID NO: 1109
  CDS (1)..(117)

SEQ ID NO: 1138 - protein, 39 aa, Streptomyces ruber; identical to SEQ ID NO: 1110

SEQ ID NO: 1139 - DNA, 102 bp, Sphingobium yanoikuyae
  CDS (1)..(102)
atgcgcatcgaccttggtgcggcgaccgagcagacccagggcccgggcggcatcgacggggacgaattcctccagcaagaccgggtcggcctggccgacgac

SEQ ID NO: 1140 - protein, 34 aa, Sphingobium yanoikuyae
MRIDLGAATEQTQGPGGIDGDEFLQQDRVGLADD

SEQ ID NO: 1141 - DNA, 102 bp, Sphingobium yanoikuyae; identical to SEQ ID NO: 1139
  CDS (1)..(102)

SEQ ID NO: 1142 - protein, 34 aa, Sphingobium yanoikuyae; identical to SEQ ID NO: 1140

SEQ ID NO: 1143 - DNA, 138 bp, Sphingopyxis fribergensis
  CDS (1)..(138)
atggaacggaatgacgatcgtaacatcgacaagctgatcgaccttggttcggtggtcgccgaaacgaagggcggcgcgaacagcggcgatgacagcttccttcagcggcagcccaccggcatcggcctcgaggacgac

SEQ ID NO: 1144 - protein, 46 aa, Sphingopyxis fribergensis
MERNDDRNIDKLIDLGSVVAETKGGANSGDDSFLQRQPTGIGLEDD

SEQ ID NO: 1145 - DNA, 117 bp, Sphingomonas sp.
  CDS (1)..(117)
atggaacgcgataatgatctgatcgatctcggcaccgccagcatcgagaccaagggcccgcgcgggcccgagcccgatatcgggcttggcaaggtcccggccggcctcgccgacgac

SEQ ID NO: 1146 - protein, 39 aa, Sphingomonas sp.
MERDNDLIDLGTASIETKGPRGPEPDIGLGKVPAGLADD

SEQ ID NO: 1147 - DNA, 135 bp, Novosphingobium sp.
  CDS (1)..(135)
atgaatgaccgtgaccagaccgacaccgccctgatcgacctcggcgatgtcgccaccgtgacccgcggccaagcggtggcccggcaggatgccagcatcggccagcagagcttcgcgctcggcatcgtcgaagac

SEQ ID NO: 1148 - protein, 45 aa, Novosphingobium sp.
MNDRDQTDTALIDLGDVATVTRGQAVARQDASIGQQSFALGIVED

SEQ ID NO: 1149 - DNA, 174 bp, Streptomyces sp.
ttgctgcgcaataccgagaggaggcgaggaaacgtgcgcgaaagtggcgacatcgaacaggccgaggtgtacgagccgccggtgctggaggaggtcggcggcttcaccgagaagactgaaggctacagtggattcagttgggacggatggggcggattcctgcacttggggggg

SEQ ID NO: 1150 - protein, 58 aa, Streptomyces sp.
MLRNTERRRGNVRESGDIEQAEVYEPPVLEEVGGFTEKTEGYSGFSWDGWGGFLHLGG

SEQ ID NO: 1151 - DNA, 126 bp, Sphingopyxis sp.
  CDS (1)..(126)
atgaaccacgaacagaatgacgatctcatcgatctcggcgccgtcaccgaggaaaccaaaggtgtcggcgagattctgaccgacggcgtcggcggacagcttccccgcgccggtctttcggacgat

SEQ ID NO: 1152 - protein, 42 aa, Sphingopyxis sp.
MNHEQNDDLIDLGAVTEETKGVGEILTDGVGGQLPRAGLSDD

SEQ ID NO: 1153 - DNA, 117 bp, Brevundimonas sp.
  CDS (1)..(117)
atgaccagcaccgttcagatccgactgatcggcttcggacccgtcaccgccctcacccggggcgccatcgtcgggccgccgctggagatcgaagagacgccgttcgacggcgtggcc

SEQ ID NO: 1154 - protein, 39 aa, Brevundimonas sp.
MTSTVQIRLIGFGPVTALTRGAIVGPPLEIEETPFDGVA

SEQ ID NO: 1155 - DNA, 117 bp, Brevundimonas sp.
  CDS (1)..(117)
atgactggcatcgctcagatccgactgatcgacctcggtcccgtcactgttctgacgaggggcgcggtgatcggcccgcccgtcgaacacgaggaaatgccgtacgacggcggggcc

SEQ ID NO: 1156 - protein, 39 aa, Brevundimonas sp.
MTGIAQIRLIDLGPVTVLTRGAVIGPPVEHEEMPYDGGA

SEQ ID NO: 1157 - DNA, 141 bp, Asticcacaulis sp.
  CDS (1)..(141)
atgcgtaaccttacccaagaaaccgcagccgtcgcgccgatcgtgctgggcgttgccaccgaagtgaccaagggcaacggcaatcaggtcgaactcgacgacgaattcgaacagcgccagatccctggcctcaccgctaac

SEQ ID NO: 1158 - protein, 47 aa, Asticcacaulis sp.
MRNLTQETAAVAPIVLGVATEVTKGNGNQVELDDEFEQRQIPGLTAN

SEQ ID NO: 1159 - DNA, 117 bp, Brevundimonas sp.; identical to SEQ ID NO: 1153
  CDS (1)..(117)

SEQ ID NO: 1160 - protein, 39 aa, Brevundimonas sp.; identical to SEQ ID NO: 1154

SEQ ID NO: 1161 - DNA, 117 bp, Brevundimonas sp.; identical to SEQ ID NO: 1155
  CDS (1)..(117)

SEQ ID NO: 1162 - protein, 39 aa, Brevundimonas sp.; identical to SEQ ID NO: 1156

SEQ ID NO: 1163 - DNA, 147 bp, Streptomyces rubellomurinus; identical to SEQ ID NO: 1125
  CDS (1)..(147)

SEQ ID NO: 1164 - protein, 49 aa, Streptomyces rubellomurinus; identical to SEQ ID NO: 1126

SEQ ID NO: 1165 - DNA, 135 bp, Sphingobium yanoikuyae
  CDS (1)..(135)
atggaacgtgatgcacattcgcaggatatcgtcgatttgggagatgcagtcgaactcacccgcggcgttctgctgatcggccaggatgatggcaacggcacgctgtacaaggcttccggcatttccgacgaagac

SEQ ID NO: 1166 - protein, 45 aa, Sphingobium yanoikuyae
MERDAHSQDIVDLGDAVELTRGVLLIGQDDGNGTLYKASGISDED

SEQ ID NO: 1167 - DNA, 138 bp, Brevundimonas abyssalis
  CDS (1)..(138)
atgcaacgcaaaggaaccataagcgacaaggttatcgatctcggcgacgtcattgccgaaaccaagggcacgacggttgacgatatccaagaccaggacaacttcctccagcgccctgaggccggcctttccatcgat

SEQ ID NO: 1168 - protein, 46 aa, Brevundimonas abyssalis
MQRKGTISDKVIDLGDVIAETKGTTVDDIQDQDNFLQRPEAGLSID

SEQ ID NO: 1169 - DNA, 120 bp, Streptomyces sp.
  CDS (1)..(120)
atgaacgaccacgaggttgtcgagtacgaggcgcccgaaatgctgcccatcggcgagttctccgagctcacgatgtggtacggctgggccagcaacgacggtgagggcacggcgatcatc

SEQ ID NO: 1170 - protein, 40 aa, Streptomyces sp.
MNDHEVVEYEAPEMLPIGEFSELTMWYGWASNDGEGTAII

SEQ ID NO: 1171 - DNA, 135 bp, Sphingobium yanoikuyae; identical to SEQ ID NO: 1165
  CDS (1)..(135)

SEQ ID NO: 1172 - protein, 45 aa, Sphingobium yanoikuyae; identical to SEQ ID NO: 1166

SEQ ID NO: 1173 - DNA, 138 bp, Burkholderia gladioli
  CDS (1)..(138)
atgagcgccattatcaaaaagcttttccgcaatcgagcaagcaatcaagcacataggttcgacgtcgtctctgtaacacatggccagccgggatatcagaccatcgatttccgagtggtcactcgactcggcggcaga

SEQ ID NO: 1174 - protein, 46 aa, Burkholderia gladioli
MSAIIKKLFRNRASNQAHRFDVVSVTHGQPGYQTIDFRVVTRLGGR

SEQ ID NO: 1175 - DNA, 126 bp, Sphingobium japonicum
  CDS (1)..(126)
atggaacggcatatcgacaatgacggtctcatcgatctgggcgatgccacgatcgaaaccaagggaccgcctgctggtgccggcgacgtgatcggccagcagcgtctcgccggcatcaccgacgag

SEQ ID NO: 1176 - protein, 42 aa, Sphingobium japonicum
MERHIDNDGLIDLGDATIETKGPPAGAGDVIGQQRLAGITDE

SEQ ID NO: 1177 - DNA, 99 bp, Sphingobium yanoikuyae; identical to SEQ ID NO: 1133
  CDS (1)..(99)

SEQ ID NO: 1178 - protein, 33 aa, Sphingobium yanoikuyae; identical to SEQ ID NO: 1134

SEQ ID NO: 1179 - DNA, 165 bp, Actinobacteria bacterium
  CDS (1)..(165)
atgaccgagcagaccgccccgccgccctgcgcgacgaccacgtctgcgccgcccgtgtacgagccgccggtggtgacgccggtgggctcgttcggcgccgacacgctcggcgacgtgagcgttgggcagagcgacgactccgacgcgggccagtactacgcgccg

SEQ ID NO: 1180 - protein, 55 aa, Actinobacteria bacterium
MTEQTAPPPCATTTSAPPVYEPPVVTPVGSFGADTLGDVSVGQSDDSDAGQYYAP

SEQ ID NO: 1181 - DNA, 135 bp, Novosphingobium sp.
  CDS (1)..(135)
atgaatgaccgtgaccagaccgacaccgccctgatcgacctcggcgatgtcgccaccgtgacccgcggccaagcggtgggtcggcaggataccagcatcggccagctgaatttcatgctcggcatcgtcgaagac

SEQ ID NO: 1182 - protein, 45 aa, Novosphingobium sp.
MNDRDQTDTALIDLGDVATVTRGQAVGRQDTSIGQLNFMLGIVED

SEQ ID NO: 1183 - DNA, 165 bp, Actinobacteria bacterium; identical to SEQ ID NO: 1179
  CDS (1)..(165)

SEQ ID NO: 1184 - protein, 55 aa, Actinobacteria bacterium; identical to SEQ ID NO: 1180

SEQ ID NO: 1185 - DNA, 135 bp, Sphingobium yanoikuyae; identical to SEQ ID NO: 1165
  CDS (1)..(135)

SEQ ID NO: 1186 - protein, 45 aa, Sphingobium yanoikuyae; identical to SEQ ID NO: 1166

SEQ ID NO: 1187 - DNA, 147 bp, Streptomyces vitaminophilus
  CDS (1)..(147)
atggaacgggagacgcgcggggagacggccgaggtgtacgagcctccggtgctggtggggatcggggacttcgctgatgagacacaggggcagtggatcggtgccgagcccgacggaagttgggggcaccacttcactcccccgagc

SEQ ID NO: 1188 - protein, 49 aa, Streptomyces vitaminophilus
MERETRGETAEVYEPPVLVGIGDFADETQGQWIGAEPDGSWGHHFTPPS

SEQ ID NO: 1189 - DNA, 135 bp, Sphingobium yanoikuyae; identical to SEQ ID NO: 1165
  CDS (1)..(135)

SEQ ID NO: 1190 - protein, 45 aa, Sphingobium yanoikuyae; identical to SEQ ID NO: 1166

SEQ ID NO: 1191 - DNA, 135 bp, Erythrobacter citreus; identical to SEQ ID NO: 813
  CDS (1)..(135)

SEQ ID NO: 1192 - protein, 45 aa, Erythrobacter citreus; identical to SEQ ID NO: 814

SEQ ID NO: 1193 - DNA, 120 bp, Nocardia nova
  CDS (1)..(120)
atgcagaagaagcagaagtacagtacgccacgtcttgccaaggtcggttccttccggaaggataccggaaacctccggcgcggcattccggagccggtcatcgtaattccgctgggcgga

SEQ ID NO: 1194 - protein, 40 aa, Nocardia nova
MQKKQKYSTPRLAKVGSFRKDTGNLRRGIPEPVIVIPLGG

SEQ ID NO: 1195 - DNA, 144 bp, Nonomuraea candida
  CDS (1)..(144)
atgagtcacgaccgcatcaccaccgccgccccggccggctacgagccgcccgaggtccgggagctgggcgacttcaccgaagagacccaggcctatgccatgtacggaggcgactggcccttcccgcgccgttactaccggccg

SEQ ID NO: 1196 - protein, 48 aa, Nonomuraea candida
MSHDRITTAAPAGYEPPEVRELGDFTEETQAYAMYGGDWPFPRRYYRP

SEQ ID NO: 1197 - DNA, 120 bp, Nocardiopsis salina
  CDS (1)..(120)
atggacaagcctgtgtacgaaaccccgttcatcgatgaggccggcgacttcctggaggtcaccggggcgctcgtcaacagcggtgatgagacccacttccccggctggtggcgctctgtc

SEQ ID NO: 1198 - protein, 40 aa, Nocardiopsis salina
MDKPVYETPFIDEAGDFLEVTGALVNSGDETHFPGWWRSV

SEQ ID NO: 1199 - DNA, 135 bp, Novosphingobium sp.
  CDS (1)..(135)
atggaaaagcagaacgagcagctcgacgagcagttcatcgacctgggttcggtgacgagcgaaacccatggcaccggtggtccggtcgaagcagacgcgaacctcaatcgcctctcgaccggcatcctcgccgac

SEQ ID NO: 1200 - protein, 45 aa, Novosphingobium sp.
MEKQNEQLDEQFIDLGSVTSETHGTGGPVEADANLNRLSTGILAD

SEQ ID NO: 1201 - DNA, 120 bp, Streptomyces sp.; identical to SEQ ID NO: 1169
  CDS (1)..(120)

SEQ ID NO: 1202 - protein, 40 aa, Streptomyces sp.; identical to SEQ ID NO: 1170

SEQ ID NO: 1203 - DNA, 138 bp, Sphingobium sp.
  CDS (1)..(138)
atggaacggaacgacgatcacaacagcgattcgctgatcgatctcggctcggtcgtcgaggaaaccaagggtggtgccatgagcggccaggatggcttccttcagcgccaggccaccggcatcggcctcgaggacgac

SEQ ID NO: 1204 - protein, 46 aa, Sphingobium sp.
MERNDDHNSDSLIDLGSVVEETKGGAMSGQDGFLQRQATGIGLEDD

SEQ ID NO: 1205 - DNA, 222 bp, Actinobaculum sp.; identical to SEQ ID NO: 1117
  CDS (1)..(222)

SEQ ID NO: 1206 - protein, 74 aa, Actinobaculum sp.; identical to SEQ ID NO: 1118

SEQ ID NO: 1207 - DNA, 120 bp, Streptomyces katrae
  CDS (1)..(120)
atgaacgaccacgaggtcctcgagtacgaggcgcccgaaatgctgcccatcggcgagttctccgagctcacgatgtggtacggctgggccagcaacgacggtgagggcacggcgatcatc

SEQ ID NO: 1208 - protein, 40 aa, Streptomyces katrae
MNDHEVLEYEAPEMLPIGEFSELTMWYGWASNDGEGTAII

SEQ ID NO: 1209 - DNA, 120 bp, Phenylobacterium zucineum
  CDS (1)..(120)
atgaacacgcgtctgcacccgcccgtgtcgcggctcatctgcctcggcggcgccaaggcctcgaccaaccagggcgtcggcatccgtcaggagctgaaccccgacgagggcttcgacgac

SEQ ID NO: 1210 - protein, 40 aa, Phenylobacterium zucineum
MNTRLHPPVSRLICLGGAKASTNQGVGIRQELNPDEGFDD

SEQ ID NO: 1211 - DNA, 120 bp, Streptomyces sp.; identical to SEQ ID NO: 1169
  CDS (1)..(120)

SEQ ID NO: 1212 - protein, 40 aa, Streptomyces sp.; identical to SEQ ID NO: 1170

SEQ ID NO: 1213 - DNA, 132 bp, Sphingomonas sp.
  CDS (1)..(132)
atggaacgcgaacatgaagccgccgacaacggtgtgatcgaactggggatcgccagcgagatcacacaagggtccggggtccagcggatcgacaatccgcaaggccagcccctgatcggcatgctcgacgac

SEQ ID NO: 1214 - protein, 44 aa, Sphingomonas sp.
MEREHEAADNGVIELGIASEITQGSGVQRIDNPQGQPLIGMLDD

SEQ ID NO: 1215 - DNA, 135 bp, Novosphingobium sp.; identical to SEQ ID NO: 1199
  CDS (1)..(135)

SEQ ID NO: 1216 - protein, 45 aa, Novosphingobium sp.; identical to SEQ ID NO: 1200

SEQ ID NO: 1217 - DNA, 129 bp, Alpha proteobacterium
  CDS (1)..(129)
atgtccaatatcgaacatgacgaagatatcgtcgatctgggtgccgcttccgtcgaaacccagggcgccatccgtggcgtcctcgacctcaccggtggtcagctgaaccagatgggcatcgctgacgac

SEQ ID NO: 1218 - protein, 43 aa, Alpha proteobacterium
MSNIEHDEDIVDLGAASVETQGAIRGVLDLTGGQLNQMGIADD

SEQ ID NO: 1219 - DNA, 126 bp, Nonomuraea candida
  CDS (1)..(126)
atgcagacccagcccacccacgtcccgtacgagccgcccaccctgcggtcactcggccgcttcgccgaggtgactcacggctacccgctcggggacttcccggacagcctctactggtactactgg

SEQ ID NO: 1220 - protein, 42 aa, Nonomuraea candida
MQTQPTHVPYEPPTLRSLGRFAEVTHGYPLGDFPDSLYWYYW

SEQ ID NO: 1221 - DNA, 93 bp, Sanguibacter keddieii
  CDS (1)..(93)
atgctcatcccgctcggctcgttcgcggacctcacggctgggctcggacgactcctggctgaccgagtcatcccggtcggccggctggtccca

SEQ ID NO: 1222 - protein, 31 aa, Sanguibacter keddieii
MLIPLGSFADLTAGLGRLLADRVIPVGRLVP

SEQ ID NO: 1223 - DNA, 117 bp, Novosphingobium sp.
  CDS (1)..(117)
atggaccgtctacacgacatcatcgacctcggcgccgccagtgtcgagaccaagggcccgatcggcgaaggcagcgacctcgtcctgggccagaacccggcgggtctttccgacgac

SEQ ID NO: 1224 - protein, 39 aa, Novosphingobium sp.
MDRLHDIIDLGAASVETKGPIGEGSDLVLGQNPAGLSDD

SEQ ID NO: 1225 - DNA, 132 bp, Sphingobium sp.
  CDS (1)..(132)
atgaacaacatcaacgagcatgaagacagcgtcgtcgatctcggcgtcgcatcggtcgaaacgaagggcgcagcgctcgacgattccgacaatatcggcggccaggtccgccagctcggtatcgccgacgac

SEQ ID NO: 1226 - protein, 44 aa, Sphingobium sp.
MNNINEHEDSVVDLGVASVETKGAALDDSDNIGGQVRQLGIADD

SEQ ID NO: 1227 - DNA, 138 bp, Sphingomonas sp.
  CDS (1)..(138)
atggaacggaatgacgatcacaacatcgatgcgctgatcgatctcggcgtcgcgaccgaagccaccaagggcggccagtcggtcatcttcgataaccagaacggtcgggatctgaccggccccgggatcgccgacgac

SEQ ID NO: 1228 - protein, 46 aa, Sphingomonas sp.
MERNDDHNIDALIDLGVATEATKGGQSVIFDNQNGRDLTGPGIADD

SEQ ID NO: 1229 - DNA, 99 bp, Sphingobium sp.
  CDS (1)..(99)
atgatcgatctgggcggcgcgagcgccgaaacgcagggcattggcctggtcgatcaggacaatcccgctggtcagcagcagaccggcattctcgacgaa

SEQ ID NO: 1230 - protein, 33 aa, Sphingobium sp.
MIDLGGASAETQGIGLVDQDNPAGQQQTGILDE

SEQ ID NO: 1231 - DNA, 132 bp, Sphingobium sp.; identical to SEQ ID NO: 1225
  CDS (1)..(132)

SEQ ID NO: 1232 - protein, 44 aa, Sphingobium sp.; identical to SEQ ID NO: 1226

SEQ ID NO: 1233 - DNA, 135 bp, Haliangium ochraceum
  CDS (1)..(135)
atggcgaagaagaagacggacacgaaaaagaccttcttgcaggacctgggcaaggcgaccgaggagaccaaatccgacggcccgcccgagcgctacgacaacctggtgttccgcaccaagggaccgtatctcggc

SEQ ID NO: 1234 - protein, 45 aa, Haliangium ochraceum
MAKKKTDTKKTFLQDLGKATEETKSDGPPERYDNLVFRTKGPYLG

SEQ ID NO: 1235 - DNA, 120 bp, Brevundimonas diminuta
  CDS (1)..(120)
atgaacacgttcaaactccgcctcgtcagcttcggcagcgccaaggcgctgacgcgcgacggcatgggtgaggaattcatcgaagggctggttcgcgacagtctttacccgcccgccggc

SEQ ID NO: 1236 - protein, 40 aa, Brevundimonas diminuta
MNTFKLRLVSFGSAKALTRDGMGEEFIEGLVRDSLYPPAG

SEQ ID NO: 1237 - DNA, 108 bp, Streptomyces sp.; identical to SEQ ID NO: 619
  CDS (1)..(108)

SEQ ID NO: 1238 - protein, 36 aa, Streptomyces sp.; identical to SEQ ID NO: 620

SEQ ID NO: 1239 - DNA, 129 bp, Sphingomonas hengshuiensis
  CDS (1)..(129)
atggaccgcgaaaccatcgaacccatcgatctcatcgacctcggcgcagccagcgctgaaacccagggcgccctcgacggccagtatgacgtcgtcgggctgatcccgcgcgaaggcctgtcggacgac

SEQ ID NO: 1240 - protein, 43 aa, Sphingomonas hengshuiensis
MDRETIEPIDLIDLGAASAETQGALDGQYDVVGLIPREGLSDD

SEQ ID NO: 1241 - DNA, 120 bp, Sphingomonas hengshuiensis
  CDS (1)..(120)
atgaagaacgaagaggcgcaggctgtcgacccgatcggcctgggcgccgagaccctgggcagctgtaccggcatgttcgaggtggtcggattcgtcctgccgcaaggcctgtcggattac

SEQ ID NO: 1242 - protein, 40 aa, Sphingomonas hengshuiensis
MKNEEAQAVDPIGLGAETLGSCTGMFEVVGFVLPQGLSDY

SEQ ID NO: 1243 - DNA, 105 bp, Sphingomonas sp.
  CDS (1)..(105)
atggtcgagcttggtgcggtgagcaccgagaccaagggtggccaagtcgggatcaatgatttcgagcgaggtcttcagctcaccggcagcggtctcacggacgac

SEQ ID NO: 1244 - protein, 35 aa, Sphingomonas sp.
MVELGAVSTETKGGQVGINDFERGLQLTGSGLTDD

SEQ ID NO: 1245 - DNA, 129 bp, Unknown
  Description of Unknown: Sphingomonas-like bacterium sequence
  CDS (1)..(129)
atggatcgcatcgaagatcgcgacgacgacaccgtcgaactcggcagcgtcacccaggagaccaagggtcctccgggaatcaaccacgacacggtcggttcgctcccgggcggcggtctctcgcacgac

SEQ ID NO: 1246 - protein, 43 aa, Unknown
  Description of Unknown: Sphingomonas-like bacterium sequence
MDRIEDRDDDTVELGSVTQETKGPPGINHDTVGSLPGGGLSHD

SEQ ID NO: 1247 - DNA, 105 bp, Sphingomonas sp.; identical to SEQ ID NO: 1243
  CDS (1)..(105)

SEQ ID NO: 1248 - protein, 35 aa, Sphingomonas sp.; identical to SEQ ID NO: 1244

SEQ ID NO: 1249 - DNA, 129 bp, Actinoplanes sp.
  CDS (1)..(129)
atggcaccgaccacttaccagcgcccgacgctgaccaagggcggctcgttcgcccgcaagaccgccggcagcctcttcaccagctgccgcgaatcgttcgtgacccagaagccgaaggccgtctgcaac

SEQ ID NO: 1250 - protein, 43 aa, Actinoplanes sp.
MAPTTYQRPTLTKGGSFARKTAGSLFTSCRESFVTQKPKAVCN

SEQ ID NO: 1251 - DNA, 129 bp, Actinoplanes sp.; identical to SEQ ID NO: 1249
  CDS (1)..(129)

SEQ ID NO: 1252 - protein, 43 aa, Actinoplanes sp.; identical to SEQ ID NO: 1250

SEQ ID NO: 1253 - DNA, 99 bp, Sphingobium sp.
  CDS (1)..(99)
atgaccgaactggggatcgccagcgaggtgacccatggcgccggccaactgcgcatcgacaatccgcagggacagccgtcgttcggcactctcgacgac

SEQ ID NO: 1254 - protein, 33 aa, Sphingobium sp.
MTELGIASEVTHGAGQLRIDNPQGQPSFGTLDD

SEQ ID NO: 1255 - DNA, 120 bp, Sphingopyxis sp.
  CDS (1)..(120)
atgcaagattatgaagccatcgagacgcaggagctcggccaggtgagcagcgatacccagggcgataatggtcgcccgatcgaaggcgccggcctgcttcccgtcaccggcatcagcgac

SEQ ID NO: 1256 - protein, 40 aa, Sphingopyxis sp.
MQDYEAIETQELGQVSSDTQGDNGRPIEGAGLLPVTGISD

SEQ ID NO: 1257 - DNA, 120 bp, Streptomyces iakyrus
  CDS (1)..(120)
atgatcgagaacgagatcgttgaatacgaggcgcccgagatgctgcccgtcggcgagttctccgaactcaccatgtggtacggctgggccagcaatgacggtgagggcgtagccatcatc

SEQ ID NO: 1258 - protein, 40 aa, Streptomyces iakyrus
MIENEIVEYEAPEMLPVGEFSELTMWYGWASNDGEGVAII

SEQ ID NO: 1259 - DNA, 108 bp, Frankia sp.
  CDS (1)..(108)
atgaaggctatctacctccccccgcgactggaagatgccggcagcttcgccgcagtgacgaacggccgctggggctgggggcgtgactactcctggcggcgttttgcg

SEQ ID NO: 1260 - protein, 36 aa, Frankia sp.
MKAIYLPPRLEDAGSFAAVTNGRWGWGRDYSWRRFA

SEQ ID NO: 1261 - DNA, 138 bp, Sphingomonas paucimobilis
  CDS (1)..(138)
atgcgtgacgaagagacggtcggccagtccgacatcatcgaactgggttcggtcaccgaactgacccgtggtccttttggtgtccaggaggacattctcaccaaccaggccctgacgagcatgggcctcgccgacgaa

SEQ ID NO: 1262 - protein, 46 aa, Sphingomonas paucimobilis
MRDEETVGQSDIIELGSVTELTRGPFGVQEDILTNQALTSMGLADE

SEQ ID NO: 1263 - DNA, 108 bp, Frankia sp.; identical to SEQ ID NO: 1259
  CDS (1)..(108)

SEQ ID NO: 1264 - protein, 36 aa, Frankia sp.; identical to SEQ ID NO: 1260

SEQ ID NO: 1265 - DNA, 108 bp, Frankia sp.; identical to SEQ ID NO: 1259
  CDS (1)..(108)

SEQ ID NO: 1266 - protein, 36 aa, Frankia sp.; identical to SEQ ID NO: 1260

SEQ ID NO: 1267 - DNA, 108 bp, Frankia sp.; identical to SEQ ID NO: 1259
  CDS (1)..(108)

SEQ ID NO: 1268 - protein, 36 aa, Frankia sp.; identical to SEQ ID NO: 1260

SEQ ID NO: 1269 - DNA, 123 bp, Sphingomonas sp.
  CDS (1)..(123)
atgaccatccaggaccaactgatcgacctcggcgcggcaaccgccgaaacccagggcttcccgatccccgagaccgacatcgtcggcgtgggccttctggcggccggtctttccgacgaggat

SEQ ID NO: 1270 - protein, 41 aa, Sphingomonas sp.
MTIQDQLIDLGAATAETQGFPIPETDIVGVGLLAAGLSDED

SEQ ID NO: 1271 - DNA, 117 bp, Brevundimonas sp.
  CDS (1)..(117)
atgaagacgaccaaactgcgcctcgtcagcttcggcagcgccaaggctctgacgcgggacaacatccagggcgaagacaccgagatgggcgtgttcccccgcccgctggccctcggc

SEQ ID NO: 1272 - protein, 39 aa, Brevundimonas sp.
MKTTKLRLVSFGSAKALTRDNIQGEDTEMGVFPRPLALG

SEQ ID NO: 1273 - DNA, 117 bp, Brevundimonas diminuta
  CDS (1)..(117)
atgcctgcagcaaaactgatccgcctcatccgcctcggcgaggcgcgcaccctgacccgcggaggcgatgaacagggtgtcctggaaatcgacttcacccgcatcaagccgatgggc

SEQ ID NO: 1274 - protein, 39 aa, Brevundimonas diminuta
MPAAKLIRLIRLGEARTLTRGGDEQGVLEIDFTRIKPMG

SEQ ID NO: 1275 - DNA, 114 bp, Brevundimonas diminuta
  CDS (1)..(114)
atgttgaacgcaatctgcatccgcctggttcgtctgggcgacgcgcgtacgctgacccggggccagtggcaccagggcgtgctcgagctggacgccacctacatccgggcggac

SEQ ID NO: 1276 - protein, 38 aa, Brevundimonas diminuta
MLNAICIRLVRLGDARTLTRGQWHQGVLELDATYIRAD

SEQ ID NO: 1277 - DNA, 108 bp, Frankia sp.; identical to SEQ ID NO: 1259
  CDS (1)..(108)

SEQ ID NO: 1278 - protein, 36 aa, Frankia sp.; identical to SEQ ID NO: 1260

SEQ ID NO: 1279 - DNA, 126 bp, Propionibacterium acidifaciens
  CDS (1)..(126)
atgtacgagacgccggttctgacgaggatcgctgattttgccgacgccaccaatggcgcagggcatgcacccctgaaagacgtatgggggttccgtgcactggctgttgtctactggccatggtcc

SEQ ID NO: 1280 - protein, 42 aa, Propionibacterium acidifaciens
MYETPVLTRIADFADATNGAGHAPLKDVWGFRALAVVYWPWS

SEQ ID NO: 1281 - DNA, 108 bp, Frankia sp.; identical to SEQ ID NO: 1259
  CDS (1)..(108)

SEQ ID NO: 1282 - protein, 36 aa, Frankia sp.; identical to SEQ ID NO: 1260

SEQ ID NO: 1283 - DNA, 129 bp, Sphingopyxis macrogoltabida
  CDS (1)..(129)
atggaccgcaaggacatcgaggcgatcgaagagctgggcatcgccagcgtcgaaacccagggcgaggaattccccgtcccggaaatcggcggctacgacctgaagcagggcggcagcatctccgccgac

SEQ ID NO: 1284 - protein, 43 aa, Sphingopyxis macrogoltabida
MDRKDIEAIEELGIASVETQGEEFPVPEIGGYDLKQGGSISAD

SEQ ID NO: 1285 - DNA, 108 bp, Frankia sp.; identical to SEQ ID NO: 1259
  CDS (1)..(108)

SEQ ID NO: 1286 - protein, 36 aa, Frankia sp.; identical to SEQ ID NO: 1260

SEQ ID NO: 1287 - DNA, 114 bp, Brevundimonas sp.
  CDS (1)..(114)
atgaccaccaccagaatcgcgctcgtccgtctcggcagcgtccgggccctcacccaactcgagcccgaaggcccgttcgccgaactgggcgtcgaccgcagccggacaccgatc

SEQ ID NO: 1288 - protein, 38 aa, Brevundimonas sp.
MTTTRIALVRLGSVRALTQLEPEGPFAELGVDRSRTPI

SEQ ID NO: 1289 - DNA, 111 bp, Brevundimonas sp.
  CDS (1)..(111)
atgcagaacccagtgaccctgacccgcctcggcagcgcccgggacctcacccggcacgagccgttcggcgacttcgtcgagatcggcttgatgcgcagcaagacgccgatc

SEQ ID NO: 1290 - protein, 37 aa, Brevundimonas sp.
MQNPVTLTRLGSARDLTRHEPFGDFVEIGLMRSKTPI

SEQ ID NO: 1291 - DNA, 108 bp, Frankia sp.; identical to SEQ ID NO: 1259
  CDS (1)..(108)

SEQ ID NO: 1292 - protein, 36 aa, Frankia sp.; identical to SEQ ID NO: 1260

SEQ ID NO: 1293 - DNA, 114 bp, Brevundimonas bacteroides
  CDS (1)..(114)
atgaccacgctgatccgccttgtccgtctgggcgacgcccgtgccctcactcgcgacgccctgccgggcccgtatctggagatgggcatcttcccgagccgcacggtcgaaggc

SEQ ID NO: 1294 - protein, 38 aa, Brevundimonas bacteroides
MTTLIRLVRLGDARALTRDALPGPYLEMGIFPSRTVEG

SEQ ID NO: 1295 - DNA, 120 bp, Brevundimonas naejangsanensis
  CDS (1)..(120)
atgacgacctccaagctgcgcatcgtcagcctcggcagcgcccgggccctgacgcgcgacctcatcggcggggatttcactgaggtgaacatgaacgacagccgcgaaccgcctctcggc

SEQ ID NO: 1296 - protein, 40 aa, Brevundimonas naejangsanensis
MTTSKLRIVSLGSARALTRDLIGGDFTEVNMNDSREPPLG

SEQ ID NO: 1297 - DNA, 123 bp, Brevundimonas sp.
  CDS (1)..(123)
atgaagatccagaacgagacgcgcgtcctgcgtctgggggccgcccgtcggctgacccgggcgatcctgatgggaccgttcaccgaactgaacccggcccgtcactggacgatgccgccggaa

SEQ ID NO: 1298 - protein, 41 aa, Brevundimonas sp.
MKIQNETRVLRLGAARRLTRAILMGPFTELNPARHWTMPPE

SEQ ID NO: 1299 - DNA, 123 bp, Brevundimonas sp.
  CDS (1)..(123)
atgaccaagagcacctcgcgcctcgtgcgcctcgggtccgcccgcaccatgacccgtgcggtctcgcgcggcgaattcgacgagctgaatccggtgctgaagtacaccattccgcccagcgaa

SEQ ID NO: 1300 - protein, 41 aa, Brevundimonas sp.
MTKSTSRLVRLGSARTMTRAVSRGEFDELNPVLKYTIPPSE

SEQ ID NO: 1301 - DNA, 108 bp, Streptomyces sp.; identical to SEQ ID NO: 695
  CDS (1)..(108)

SEQ ID NO: 1302 - protein, 36 aa, Streptomyces sp.; identical to SEQ ID NO: 696

SEQ ID NO: 1303 - DNA, 108 bp, Kibdelosporangium aridum
  CDS (1)..(108)
atgcgcacatacgagcgtccgactctgcgggcctctggctccttcaccaagaagaccggtgtcggcagtcacggtccggctgacctcattgttctgtcccacaagaac

SEQ ID NO: 1304 - protein, 36 aa, Kibdelosporangium aridum
MRTYERPTLRASGSFTKKTGVGSHGPADLIVLSHKN

SEQ ID NO: 1305 - DNA, 120 bp, Sphingopyxis sp.
  CDS (1)..(120)
atggaccgcgaactcaatgagttgatcgaactcggcagcgttaccggcgacaccgcgggcagcgaagacgtcggcatcgaaacgaacggcaagttcaagccgctcggactcagccaggac

SEQ ID NO: 1306 - protein, 40 aa, Sphingopyxis sp.
MDRELNELIELGSVTGDTAGSEDVGIETNGKFKPLGLSQD

SEQ ID NO: 1307 - DNA, 120 bp, Sphingopyxis sp.
  CDS (1)..(120)
atggaacgcgataacgacacgctcgtcgaactcggctcggtctccggtgacaccgccggcgactggggcctgtatgtcgaagccggcggccgtatgccgacgcccggtctcgtccaggac

SEQ ID NO: 1308 - protein, 40 aa, Sphingopyxis sp.
MERDNDTLVELGSVSGDTAGDWGLYVEAGGRMPTPGLVQD

SEQ ID NO: 1309 - DNA, 120 bp, Sphingopyxis sp.; identical to SEQ ID NO: 1305
  CDS (1)..(120)

SEQ ID NO: 1310 - protein, 40 aa, Sphingopyxis sp.; identical to SEQ ID NO: 1306

SEQ ID NO: 1311 - DNA, 120 bp, Sphingopyxis sp.; identical to SEQ ID NO: 1307
  CDS (1)..(120)

SEQ ID NO: 1312 - protein, 40 aa, Sphingopyxis sp.; identical to SEQ ID NO: 1308

SEQ ID NO: 1313 - DNA, 141 bp, Candidatus Odyssella thessalonicensis
  CDS (1)..(141)
atggaaaatatcgaaatcaccacaaaaacatcaacagtcctagataccaatttggtggttgtcttagaagagagtgcatcttccctaactcaaggctgttgtgggggatggttagaacaatggggaggatactctcgcccg

SEQ ID NO: 1314 - protein, 47 aa, Candidatus Odyssella thessalonicensis
MENIEITTKTSTVLDTNLVVVLEESASSLTQGCCGGWLEQWGGYSRP

SEQ ID NO: 1315 - DNA, 141 bp, Candidatus Odyssella thessalonicensis
  CDS (1)..(141)
atggaaaatatcgaaattaccacagaaatatcagcaatcctagataccaatttgggggttgtcttagaagagagcgcatcttctctaacaagagggctggttggcacaggaaaagaaggtttttgtgttggttttaggtat

SEQ ID NO: 1316 - protein, 47 aa, Candidatus Odyssella thessalonicensis
MENIEITTEISAILDTNLGVVLEESASSLTRGLVGTGKEGFCVGFRY

SEQ ID NO: 1317 - DNA, 135 bp, Sphingopyxis macrogoltabida
  CDS (1)..(135)
atgaaaaaggaactcgactatcgcgacgacgagctgatcgatctcggtgcggtcaccgacgaaacccacggcggccctctcggcgctttccccgactcgcccgatccgcgggccccgctcgggatcatcgtcgat

SEQ ID NO: 1318 - protein, 45 aa, Sphingopyxis macrogoltabida
MKKELDYRDDELIDLGAVTDETHGGPLGAFPDSPDPRAPLGIIVD

SEQ ID NO: 1319 - DNA, 159 bp, Streptomyces roseochromogenus
  CDS (1)..(159)
atggaaatccagaaggtgctcacgaacgaggagcgggtggctgtcgaggagccggtcgcctacgagccgccgatggtcgcggaggccgggaggttcgcacacgacacgcgcggtggttacgggaagtacagggaagccggtatcggccgttttgaagcg

SEQ ID NO: 1320 - protein, 53 aa, Streptomyces roseochromogenus
MEIQKVLTNEERVAVEEPVAYEPPMVAEAGRFAHDTRGGYGKYREAGIGRFEA

SEQ ID NO: 1321 - DNA, 120 bp, Actinomyces naeslundii
  CDS (1)..(120)
atggacagcaaaacctatgagagcccgttcatcgtcggtctcgggaccttcaccgaggtgaccggattcggcatcggtggtcaggctgagggctggaaccccattgccgaccgcaagaac

SEQ ID NO: 1322 - protein, 40 aa, Actinomyces naeslundii
MDSKTYESPFIVGLGTFTEVTGFGIGGQAEGWNPIADRKN

SEQ ID NO: 1323 - DNA, 120 bp, Actinomyces naeslundii
  CDS (1)..(120)
atgcgcgacatctacaccactccggctatccactcccttggtggcttcaccacgcagactggtgagttcatcggtccgcacactgaggcaatcctgccgctcgaggaccactccaaggag

SEQ ID NO: 1324 - protein, 40 aa, Actinomyces naeslundii
MRDIYTTPAIHSLGGFTTQTGEFIGPHTEAILPLEDHSKE

SEQ ID NO: 1325 - DNA, 129 bp, Actinomyces naeslundii
gtgtcacccttggctgacgtttacacgactccgtgcgtcgtcgacctcggcgactttgttgagcagactggtgagttcatcggtccgcacactgaggcaatcctgccgctcgaggaccactccaaggag

SEQ ID NO: 1326 - protein, 43 aa, Actinomyces naeslundii
MSPLADVYTTPCVVDLGDFVEQTGEFIGPHTEAILPLEDHSKE

SEQ ID NO: 1327 - DNA, 138 bp, Novosphingobium sp.
  CDS (1)..(138)
atggaacgtatcgaacacaacgaagacatcatcgaactcggcgacgcgaccgtcgtcacccgcggcagccttgtcgtgggccagcccgactccgatcaggttctcaaccggatcggcgcgggcatcaccgacgaggat

SEQ ID NO: 1328 - protein, 46 aa, Novosphingobium sp.
MERIEHNEDIIELGDATVVTRGSLVVGQPDSDQVLNRIGAGITDED

SEQ ID NO: 1329 - DNA, 129 bp, Novosphingobium subterraneum
  CDS (1)..(129)
atggaacgcacgttcgatctcgtcgaggacgtcgaagacttgggcaccgccagcatcgaaacgctcggccctccgggagaccggatcgagttcggtgtgctcgcgcagctgccgggccttgatcgcgac

SEQ ID NO: 1330 - protein, 43 aa, Novosphingobium subterraneum
MERTFDLVEDVEDLGTASIETLGPPGDRIEFGVLAQLPGLDRD

SEQ ID NO: 1331 - DNA, 117 bp, Rhodococcus fascians
  CDS (1)..(117)
atgatcaaggattacgaatctcccgctgtcgtcgacctgggtagcttccaggacgagaccggtttcggcatcggtggccaggccgagggctggaacccgatcgcggatcgcaagaac

SEQ ID NO: 1332 - protein, 39 aa, Rhodococcus fascians
MIKDYESPAVVDLGSFQDETGFGIGGQAEGWNPIADRKN

SEQ ID NO: 1333 - DNA, 120 bp, Rhodococcus fascians
  CDS (1)..(120)
atgtcgaaggcatacgaaacacctgctgttgcagatctgggccgcttccaggacgagaccggagagttcatcggtccgcacaccgaggcaatcctgccgttcgaggatcactccaaggag

SEQ ID NO: 1334 - protein, 40 aa, Rhodococcus fascians
MSKAYETPAVADLGRFQDETGEFIGPHTEAILPFEDHSKE

SEQ ID NO: 1335 - DNA, 117 bp, Rhodococcus fascians
  CDS (1)..(117)
atgaccgaggattaccaagccccgaccatcgtcgacctgggtagcttccaggacgagacaggtttcggcatcggtggccaggccgagggctggaacccgatcgccgatcgcaagaac

SEQ ID NO: 1336 - protein, 39 aa, Rhodococcus fascians
MTEDYQAPTIVDLGSFQDETGFGIGGQAEGWNPIADRKN

SEQ ID NO: 1337 - DNA, 126 bp, Alpha proteobacterium
  CDS (1)..(126)
atgaccaccaagagcatctcgcgcctcgttcgcctgggcgccgcccgcaagctcacccgggccggcgtcctcggcgagttcatcgagctgaacccggccgagcgctacgacatcactgtcggcgcc

SEQ ID NO: 1338 - protein, 42 aa, Alpha proteobacterium
MTTKSISRLVRLGAARKLTRAGVLGEFIELNPAERYDITVGA

SEQ ID NO: 1339 - DNA, 168 bp, Streptomyces sp.
  CDS (1)..(168)
atgcgagggggacaggtgacacacaccacacagagggacgaccagccgcgggagacatacgagccgccgacgctcgccgaggccggcgacttcgcggaggtcacgctcggtgccatggacgggaacgtcgccgacggcgggccgtggccgaccagcgtggcctggggg

SEQ ID NO: 1340 - protein, 56 aa, Streptomyces sp.
MRGGQVTHTTQRDDQPRETYEPPTLAEAGDFAEVTLGAMDGNVADGGPWPTSVAWG

SEQ ID NO: 1341 - DNA, 117 bp, Rhodococcus fascians; identical to SEQ ID NO: 1335
  CDS (1)..(117)

SEQ ID NO: 1342 - protein, 39 aa, Rhodococcus fascians; identical to SEQ ID NO: 1336

SEQ ID NO: 1343 - DNA, 117 bp, Rhodococcus fascians; identical to SEQ ID NO: 1331
  CDS (1)..(117)

SEQ ID NO: 1344 - protein, 39 aa, Rhodococcus fascians; identical to SEQ ID NO: 1332

SEQ ID NO: 1345 - DNA, 120 bp, Rhodococcus fascians
  CDS (1)..(120)
atgtcgaagccatacgaaacacctgctgttgcggatctgggccgtttccaggacgagaccggagagttcatcggtccgcacaccgaagcgatcctgccgttcgaggatcactccaaggag

SEQ ID NO: 1346 - protein, 40 aa, Rhodococcus fascians
MSKPYETPAVADLGRFQDETGEFIGPHTEAILPFEDHSKE

SEQ ID NO: 1347 - DNA, 117 bp, Rhodococcus fascians; identical to SEQ ID NO: 1331
  CDS (1)..(117)

SEQ ID NO: 1348 - protein, 39 aa, Rhodococcus fascians; identical to SEQ ID NO: 1332

SEQ ID NO: 1349 - DNA, 120 bp, Rhodococcus fascians; identical to SEQ ID NO: 1345
  CDS (1)..(120)

SEQ ID NO: 1350 - protein, 40 aa, Rhodococcus fascians; identical to SEQ ID NO: 1346

SEQ ID NO: 1351 - DNA, 117 bp, Rhodococcus fascians; identical to SEQ ID NO: 1335
  CDS (1)..(117)

SEQ ID NO: 1352 - protein, 39 aa, Rhodococcus fascians; identical to SEQ ID NO: 1336

SEQ ID NO: 1353 - DNA, 126 bp, Streptococcus suis
  CDS (1)..(126)
atgtaccaaaaaccaactattacaaaaatcggtagctatcgaactttgacaaatggtgcaggtggtgcacgtgaacgtgatttacttggcttccgtgcgttgattgttattcactggccatggttg

SEQ ID NO: 1354 - protein, 42 aa, Streptococcus suis
MYQKPTITKIGSYRTLTNGAGGARERDLLGFRALIVIHWPWL

SEQ ID NO: 1355 - DNA, 126 bp, Brevundimonas sp.
  CDS (1)..(126)
atgaccaccaagagcatctcgcgcctcgttcgcctgggcgccgctcgccagctcacccgcgccaactcgcgcggcgaattcgacgagctgaatcccgtgctgaagtacacgattccgccgaccgaa

SEQ ID NO: 1356 - protein, 42 aa, Brevundimonas sp.
MTTKSISRLVRLGAARQLTRANSRGEFDELNPVLKYTIPPTE

SEQ ID NO: 1357 - DNA, 123 bp, Brevundimonas sp.
  CDS (1)..(123)
atgaagatccggaccgacgcgccgatcctgcgactgggggccgctcgccggctgacccgggccatcgcgatggggccgttcaccgaactgaatccggcccggcactggaccatgccgcccgaa

SEQ ID NO: 1358 - protein, 41 aa, Brevundimonas sp.
MKIRTDAPILRLGAARRLTRAIAMGPFTELNPARHWTMPPE

SEQ ID NO: 1359 - DNA, 138 bp, Sphingobium herbicidovorans
  CDS (1)..(138)
atgaaccacaatgacaccgtcgaagacggcatcgaagaactgggcgtcgccagcgtcgtcacgctcgggccggctccgccctatcccgaggatcatctcctcagcccgatccccgtcggcggcggcatctccgccgac

SEQ ID NO: 1360 - protein, 46 aa, Sphingobium herbicidovorans
MNHNDTVEDGIEELGVASVVTLGPAPPYPEDHLLSPIPVGGGISAD

SEQ ID NO: 1361 - DNA, 126 bp, Streptococcus suis; identical to SEQ ID NO: 1353
  CDS (1)..(126)

SEQ ID NO: 1362 - protein, 42 aa, Streptococcus suis; identical to SEQ ID NO: 1354

SEQ ID NO: 1363 - DNA, 126 bp, Streptococcus pseudopneumoniae
  CDS (1)..(126)
atgtaccaaaaaccaactattacaaaaatcggtagctatcgaactttgacaaatggtgcaggcactgcacgtgaacgtgatttacttggctttcgtgcgttgattgttattcactggccatggttg

SEQ ID NO: 1364 - protein, 42 aa, Streptococcus pseudopneumoniae
MYQKPTITKIGSYRTLTNGAGTARERDLLGFRALIVIHWPWL

SEQ ID NO: 1365 - DNA, 132 bp, Sphingopyxis sp.
  CDS (1)..(132)
atggaccgcatcgacaacgccgaaatcgaagaactgggcatcgccagcgtcgaaacgctcggcgggcttctgccctatcccgaggatggctcggtcatccacttcaagccggacggcgcgatcaccgccgac

SEQ ID NO: 1366 - protein, 44 aa, Sphingopyxis sp.
MDRIDNAEIEELGIASVETLGGLLPYPEDGSVIHFKPDGAITAD

SEQ ID NO: 1367 - DNA, 129 bp, Hyphomonas chukchiensis
  CDS (1)..(129)
atgaatacgcagacagacgaccatcttgacgatgatgcattcgagccgatcgaattgggatcggtgtcggaagagaccaagggccagccaaacggcctgatcgaactgttcggtcagaattcgcggaac

SEQ ID NO: 1368 - protein, 43 aa, Hyphomonas chukchiensis
MNTQTDDHLDDDAFEPIELGSVSEETKGQPNGLIELFGQNSRN

SEQ ID NO: 1369 - DNA, 126 bp, Streptococcus suis; identical to SEQ ID NO: 1353
  CDS (1)..(126)

SEQ ID NO: 1370 - protein, 42 aa, Streptococcus suis; identical to SEQ ID NO: 1354

SEQ ID NO: 1371 - DNA, 120 bp, Sphingopyxis macrogoltabida
  CDS (1)..(120)
atggatcgtgaaaccaatgacatcgtcgagctcggcagcgtcagcgtcgacacggcgggcgaagaccgggtcggaatcgaatccggcggcaaatatcagccgctcggcctgacccaggac

SEQ ID NO: 1372 - protein, 40 aa, Sphingopyxis macrogoltabida
MDRETNDIVELGSVSVDTAGEDRVGIESGGKYQPLGLTQD

SEQ ID NO: 1373 - DNA, 126 bp, Sphingopyxis macrogoltabida
  CDS (1)..(126)
atggaacgcgaactgcaaacggacgatctcgtcgaactcggcacagtcagcggcgacacggccggcgatttcggactgccgctcgaatccggcggccgcatgacccgccccggtcttgcccaggac

SEQ ID NO: 1374 - protein, 42 aa, Sphingopyxis macrogoltabida
MERELQTDDLVELGTVSGDTAGDFGLPLESGGRMTRPGLAQD

SEQ ID NO: 1375 - DNA, 135 bp, Actinobaculum sp.
ttggaggaggtgaatatcgtgacatacacgactcctaggattgagaagctcgccgattacagcaacgccactcgtggcggttcatggggtaacacccgtgatgtttggtggggcagatggtggaacttctggtac

SEQ ID NO: 1376 - protein, 45 aa, Actinobaculum sp.
MEEVNIVTYTTPRIEKLADYSNATRGGSWGNTRDVWWGRWWNFWY

SEQ ID NO: 1377 - DNA, 108 bp, Actinobaculum sp.
  CDS (1)..(108)
atgatcgagaagatcgccgactacagcgaggccactcgcggcgtttggttcggcgcctggcgggacattctcaaggcgaaggctccgttctacttcgatgccaagctc

SEQ ID NO: 1378 - protein, 36 aa, Actinobaculum sp.
MIEKIADYSEATRGVWFGAWRDILKAKAPFYFDAKL

SEQ ID NO: 1379 - DNA, 120 bp, Actinobaculum sp.
  CDS (1)..(120)
atggcatacaccacccccacgatcgagaagatcgccgactatactgaagctactcacggcatccggcggggacgttcctatgatttgaaccacgctagatttaccattgttaatctctgg

SEQ ID NO: 1380 - protein, 40 aa, Actinobaculum sp.
MAYTTPTIEKIADYTEATHGIRRGRSYDLNHARFTIVNLW

SEQ ID NO: 1381 - DNA, 111 bp, Actinobaculum sp.
  CDS (1)..(111)
atggcatacaccactccaacgattgaaaagctagctacctacagcgatgtcacccgtggagggccgcgaggctacttccgcgattggcaccatggaaggctgatctggctc

SEQ ID NO: 1382 - protein, 37 aa, Actinobaculum sp.
MAYTTPTIEKLATYSDVTRGGPRGYFRDWHHGRLIWL

SEQ ID NO: 1383 - DNA, 132 bp, Actinobaculum sp.
  CDS (1)..(132)
atgagaatatacattgcacctgcaatcgaaaaaatcgccgactaccacaagaccacgcgtggagccttctacggctccgtacgcgattggttcggcttgcggtggcgaggggcgggctcctcctcccacttc

SEQ ID NO: 1384 - protein, 44 aa, Actinobaculum sp.
MRIYIAPAIEKIADYHKTTRGAFYGSVRDWFGLRWRGAGSSSHF

SEQ ID NO: 1385 - DNA, 99 bp, Stenotrophomonas maltophilia
  CDS (1)..(99)
atgggtggcgaactgatcgagctgggctcggtggtttcggaaacgaaggcgcacaaccacggcacgttgtgggatggcgtgttcccgaccacgtcgccc

SEQ ID NO: 1386 - protein, 33 aa, Stenotrophomonas maltophilia
MGGELIELGSVVSETKAHNHGTLWDGVFPTTSP

SEQ ID NO: 1387 - DNA, 114 bp, Sphingomonas sp.
  CDS (1)..(114)
atgaagcaagaaacacgttccaagctgatccgtctcggcagtatccggcgtgataccaaggcgatcgtgacagccgggcagcaggaagaattcctgccgattctttcctacatg

SEQ ID NO: 1388 - protein, 38 aa, Sphingomonas sp.
MKQETRSKLIRLGSIRRDTKAIVTAGQQEEFLPILSYM

SEQ ID NO: 1389 - DNA, 99 bp, Stenotrophomonas maltophilia; identical to SEQ ID NO: 1385
  CDS (1)..(99)

SEQ ID NO: 1390 - protein, 33 aa, Stenotrophomonas maltophilia; identical to SEQ ID NO: 1386

SEQ ID NO: 1391 - DNA, 99 bp, Stenotrophomonas maltophilia; identical to SEQ ID NO: 1385
  CDS (1)..(99)

SEQ ID NO: 1392 - protein, 33 aa, Stenotrophomonas maltophilia; identical to SEQ ID NO: 1386

SEQ ID NO: 1393 - DNA, 126 bp, Streptococcus salivarius
  CDS (1)..(126)
atgtaccaaaaaccaactattacaaaaatcggtaactaccgtactttgacaaatggtgcaggtaaagcacgtgagcgcgatttgcttggctttagtgcgttgatcgttatccactggccttgggga

SEQ ID NO: 1394 - protein, 42 aa, Streptococcus salivarius
MYQKPTITKIGNYRTLTNGAGKARERDLLGFSALIVIHWPWG

SEQ ID NO: 1395 - DNA, 129 bp, Arthrobacter sp.
  CDS (1)..(129)
atgaaaagcaactattctgctccgcgtgtagcgcgggtgggttcgttccgtgaagtgacaaacggtgtttggttcggacgctggcgcgacatcttcggcggtcgggcattcgttaaggtcgacgtcggc

SEQ ID NO: 1396 - protein, 43 aa, Arthrobacter sp.
MKSNYSAPRVARVGSFREVTNGVWFGRWRDIFGGRAFVKVDVG

SEQ ID NO: 1397 - DNA, 93 bp, Sanguibacter keddieii; identical to SEQ ID NO: 1221
  CDS (1)..(93)

SEQ ID NO: 1398 - protein, 31 aa, Sanguibacter keddieii; identical to SEQ ID NO: 1222

SEQ ID NO: 1399 - DNA, 144 bp, Streptomyces roseoverticillatus
gtggatcccgtggacgagaagaagaccgtggacgagaagaagacctgcgaatcgcccgggctcgtcgagaccggcaccttcgaagaggacacgcagggccggcggggggacttccgggacggcccctccggccggcgcgaccgg

SEQ ID NO: 1400 - protein, 48 aa, Streptomyces roseoverticillatus
MDPVDEKKTVDEKKTCESPGLVETGTFEEDTQGRRGDFRDGPSGRRDR

SEQ ID NO: 1401 - DNA, 123 bp, Candidatus Paracaedibacter symbiosus
  CDS (1)..(123)
atggaaaatattgaaattaatgatactgagtatggaatcactttagaagcaagcgcttcaactttaactcaaggtaggctgggtggagacagcgagggaaattcccattatccattgcagaga

SEQ ID NO: 1402 - protein, 41 aa, Candidatus Paracaedibacter symbiosus
MENIEINDTEYGITLEASASTLTQGRLGGDSEGNSHYPLQR

SEQ ID NO: 1403 - DNA, 126 bp, Candidatus Paracaedibacter symbiosus
  CDS (1)..(126)
atggaaaatattgaaattaatgatactgagtatggaatcactttggtagcaagcgcttctactttaactcagggttccaaagggggcgacccctcagaaggttctggggcttattacacttatgtc

SEQ ID NO: 1404 - protein, 42 aa, Candidatus Paracaedibacter symbiosus
MENIEINDTEYGITLVASASTLTQGSKGGDPSEGSGAYYTYV

SEQ ID NO: 1405 - DNA, 99 bp, Stenotrophomonas maltophilia
  CDS (1)..(99)
atgggtggcgaaccgatcgagctgggctcggtggtttcggaaacgaaggcgcacaaccacggcacgttgtgggatggcgtgttcccgaccacgtcgccc

SEQ ID NO: 1406 - protein, 33 aa, Stenotrophomonas maltophilia
MGGEPIELGSVVSETKAHNHGTLWDGVFPTTSP

SEQ ID NO: 1407 - DNA, 159 bp, Stenotrophomonas maltophilia
  CDS (1)..(159)
atgaacgagctgattgagctgggtgtagtggcaggacagcagaaccctgaggatcagggtgtgggtggcgaactgatcgagctgggctcggtggtttcggaaacgaaggcgcacaaccacggcacgttgtgggatggcgtgttcccgaccacgtcgccc

SEQ ID NO: 1408 - protein, 53 aa, Stenotrophomonas maltophilia
MNELIELGVVAGQQNPEDQGVGGELIELGSVVSETKAHNHGTLWDGVFPTTSP

SEQ ID NO: 1409 - DNA, 144 bp, Hyphomonas oceanitis
  CDS (1)..(144)
atgaatacgcagacagacgaccatcttgacgatgatgcattcgagccgatcgaattgggatcggtgtcggaagagacccggggcggtttcaaccagggcgccgaattcgccgtggggccgaactcgcggctcatcccgatcggc

SEQ ID NO: 1410 - protein, 48 aa, Hyphomonas oceanitis
MNTQTDDHLDDDAFEPIELGSVSEETRGGFNQGAEFAVGPNSRLIPIG

SEQ ID NO: 1411 - DNA, 114 bp, Blastomonas sp.
  CDS (1)..(114)
atgaagaaggaaactcgttcgaagctgatccgtctgggcagtattcgtcgtgacaccaaggccatcgtgatcgctggccagcaggaagaattcctgccgattctctcgtacgcg

SEQ ID NO: 1412 - protein, 38 aa, Blastomonas sp.
MKKETRSKLIRLGSIRRDTKAIVIAGQQEEFLPILSYA

SEQ ID NO: 1413 - DNA, 135 bp, Hyphomonas sp.
  CDS (1)..(135)
atgaatacgcacacagatgatcatcttgaggatgacgccttcgagccagtcaacctcgggtcggtttccgaggaaacgcgcgggatcggccccctcggtgacgagttcaaccagggcagcgtcaacagccgcgaa

SEQ ID NO: 1414 - protein, 45 aa, Hyphomonas sp.
MNTHTDDHLEDDAFEPVNLGSVSEETRGIGPLGDEFNQGSVNSRE

SEQ ID NO: 1415 - DNA, 126 bp, Paenibacillus sp.
  CDS (1)..(126)
atgaaaaatgtttactccaaaccaacaatcgagaaagtagctggttttaaagagtctactaaaggattttttgccggtaagtggacagatgtttatggcggtaaggcttttgtacgcattgagttc

SEQ ID NO: 1416 - protein, 42 aa, Paenibacillus sp.
MKNVYSKPTIEKVAGFKESTKGFFAGKWTDVYGGKAFVRIEF

SEQ ID NO: 1417 - DNA, 135 bp, Enterococcus faecalis
  CDS (1)..(135)
atgacaaagcaaaattacagtaaaccatcaattgaaaaaattgcaggttttaaagaatctactcgtggtctttggacaggtaaatttagagatgtatttggtggacgcgctcttttccaagttgtaatttattac

SEQ ID NO: 1418 - protein, 45 aa, Enterococcus faecalis
MTKQNYSKPSIEKIAGFKESTRGLWTGKFRDVFGGRALFQVVIYY

SEQ ID NO: 1419 - DNA, 144 bp, Hyphomonas oceanitis; identical to SEQ ID NO: 1409
  CDS (1)..(144)

SEQ ID NO: 1420 - protein, 48 aa, Hyphomonas oceanitis; identical to SEQ ID NO: 1410

SEQ ID NO: 1421 - DNA, 141 bp, Hyphomonas atlantica
  CDS (1)..(141)
atggaacgcgatagatttgacccaaccgcattggaggagtctgacctgctggatctcggcagtgtctcggaagagacgaaaggtcgcttcatgcaacccttcgaattcggtgtctcaccgacttcccgcgatgaagccggc

SEQ ID NO: 1422 - protein, 47 aa, Hyphomonas atlantica
MERDRFDPTALEESDLLDLGSVSEETKGRFMQPFEFGVSPTSRDEAG

SEQ ID NO: 1423 - DNA, 135 bp, Enterococcus faecalis; identical to SEQ ID NO: 1417
  CDS (1)..(135)

SEQ ID NO: 1424 - protein, 45 aa, Enterococcus faecalis; identical to SEQ ID NO: 1418

SEQ ID NO: 1425 - DNA, 135 bp, Enterococcus faecalis; identical to SEQ ID NO: 1417
  CDS (1)..(135)

SEQ ID NO: 1426 - protein, 45 aa, Enterococcus faecalis; identical to SEQ ID NO: 1418

SEQ ID NO: 1427 - DNA, 135 bp, Enterococcus faecalis; identical to SEQ ID NO: 1417
  CDS (1)..(135)

SEQ ID NO: 1428 - protein, 45 aa, Enterococcus faecalis; identical to SEQ ID NO: 1418

SEQ ID NO: 1429 - DNA, 135 bp, Enterococcus faecalis; identical to SEQ ID NO: 1417
  CDS (1)..(135)

SEQ ID NO: 1430 - protein, 45 aa, Enterococcus faecalis; identical to SEQ ID NO: 1418

SEQ ID NO: 1431 - DNA, 135 bp, Enterococcus faecalis; identical to SEQ ID NO: 1417
  CDS (1)..(135)

SEQ ID NO: 1432 - protein, 45 aa, Enterococcus faecalis; identical to SEQ ID NO: 1418

SEQ ID NO: 1433 - DNA, 135 bp, Enterococcus faecalis; identical to SEQ ID NO: 1417
  CDS (1)..(135)

SEQ ID NO: 1434 - protein, 45 aa, Enterococcus faecalis; identical to SEQ ID NO: 1418

SEQ ID NO: 1435 - DNA, 135 bp, Enterococcus faecalis; identical to SEQ ID NO: 1417
  CDS (1)..(135)

SEQ ID NO: 1436 - protein, 45 aa, Enterococcus faecalis; identical to SEQ ID NO: 1418

SEQ ID NO: 1437 - DNA, 135 bp, Enterococcus faecalis; identical to SEQ ID NO: 1417
  CDS (1)..(135)

SEQ ID NO: 1438 - protein, 45 aa, Enterococcus faecalis; identical to SEQ ID NO: 1418

SEQ ID NO: 1439 - DNA, 135 bp, Enterococcus faecalis; identical to SEQ ID NO: 1417
  CDS (1)..(135)

SEQ ID NO: 1440 - protein, 45 aa, Enterococcus faecalis; identical to SEQ ID NO: 1418

SEQ ID NO: 1441 - DNA, 135 bp, Enterococcus faecalis; identical to SEQ ID NO: 1417
  CDS (1)..(135)

SEQ ID NO: 1442 - protein, 45 aa, Enterococcus faecalis; identical to SEQ ID NO: 1418

SEQ ID NO: 1443 - DNA, 156 bp, Xanthomonas pisi
  CDS (1)..(156)
atgaacgcattgatcgaactcggcttggcagaacagtccatccagcaggatcaggatgctggcagcgacctcatcgagctgggcgccgtggtgtctgaaacaaaggcgcacggccatggaacgttgtgggacggcatctttccgaccacgtctccg

SEQ ID NO: 1444 - protein, 52 aa, Xanthomonas pisi
MNALIELGLAEQSIQQDQDAGSDLIELGAVVSETKAHGHGTLWDGIFPTTSP

SEQ ID NO: 1445 - DNA, 117 bp, Sphingopyxis sp.
  CDS (1)..(117)
atggaacgcgagaatgacactgtcgaactgggctcggcgagcgccgacactctcggcaacttcggccctccggtcgagatcggcggccacgaactgcccgccggcattgacgtcgag

SEQ ID NO: 1446 - protein, 39 aa, Sphingopyxis sp.
MERENDTVELGSASADTLGNFGPPVEIGGHELPAGIDVE

SEQ ID NO: 1447 - DNA, 159 bp, Stenotrophomonas maltophilia
  CDS (1)..(159)
atgaacgagctgattgagctgggtgtagtggcaggacagcagaaccctgaaggccagggtgtgggcggtgatctgatcgagctgggctcggtggtttcggaaaccaaggcacacaaccacggcaccttgtgggatggcgtgttcccgaccacctcgccc

SEQ ID NO: 1448 - protein, 53 aa, Stenotrophomonas maltophilia
MNELIELGVVAGQQNPEGQGVGGDLIELGSVVSETKAHNHGTLWDGVFPTTSP

SEQ ID NO: 1449 - DNA, 132 bp, Actinobaculum sp.; identical to SEQ ID NO: 1383
  CDS (1)..(132)

SEQ ID NO: 1450 - protein, 44 aa, Actinobaculum sp.; identical to SEQ ID NO: 1384

SEQ ID NO: 1451 - DNA, 135 bp, Sphingobium xenophagum
  CDS (1)..(135)
atgaagacccagaacagcgagctgatcgatctcggcgccatcagcgtcgaaacccgcggcatcgaacctgtcggtccgcgcgatgaagacaccaacgagcattatctgttcgtcggcggcatcaccgctgaagac

SEQ ID NO: 1452 - protein, 45 aa, Sphingobium xenophagum
MKTQNSELIDLGAISVETRGIEPVGPRDEDTNEHYLFVGGITAED

SEQ ID NO: 1453 - DNA, 135 bp, Paenibacillus taiwanensis
  CDS (1)..(135)
atgacaaacgttgtttactccaaaccaacaattgagaaagtggctggctttaaagagtctactaaagggctttggactggtaaatacacagatgtttttggtggacgtgcattaattaaaatcataattcaaacc

SEQ ID NO: 1454 - protein, 45 aa, Paenibacillus taiwanensis
MTNVVYSKPTIEKVAGFKESTKGLWTGKYTDVFGGRALIKIIIQT

SEQ ID NO: 1455 - DNA, 132 bp, Actinobaculum sp.; identical to SEQ ID NO: 1383
  CDS (1)..(132)

SEQ ID NO: 1456 - protein, 44 aa, Actinobaculum sp.; identical to SEQ ID NO: 1384

SEQ ID NO: 1457 - DNA, 126 bp, Actinobaculum sp.
  CDS (1)..(126)
atggcaatatacactgctcccgcgattgagaagatcgctgactacagcgaagccacccgtggcggctggcggggccgttggaacgattactatggtggccgctatggcttgcgcattgttcccgtc

SEQ ID NO: 1458 - protein, 42 aa, Actinobaculum sp.
MAIYTAPAIEKIADYSEATRGGWRGRWNDYYGGRYGLRIVPV

SEQ ID NO: 1459 - DNA, 108 bp, Actinobaculum sp.; identical to SEQ ID NO: 1377
  CDS (1)..(108)

SEQ ID NO: 1460 - protein, 36 aa, Actinobaculum sp.; identical to SEQ ID NO: 1378

SEQ ID NO: 1461 - DNA, 126 bp, Actinobaculum sp.
  CDS (1)..(126)
atggcagaatacactgctcccgcgattgagaagatcgccgactacagcaaagtcacccgaggctccgctataggcgtgtggcgcgattactatggggctatgtatggatggacgcgcctacccctc

SEQ ID NO: 1462 - protein, 42 aa, Actinobaculum sp.
MAEYTAPAIEKIADYSKVTRGSAIGVWRDYYGAMYGWTRLPL

SEQ ID NO: 1463 - DNA, 129 bp, Paenarthrobacter nicotinovorans
  CDS (1)..(129)
atgaaaagcaactattctgctccgcgtgtagcgcgggtgggttcgttccgtgaagtgacaaacggtgtttggttcggacgctggcgcgacatcttcggcggtcgggcattcgttaaggtcgacatcggc

SEQ ID NO: 1464 - protein, 43 aa, Paenarthrobacter nicotinovorans
MKSNYSAPRVARVGSFREVTNGVWFGRWRDIFGGRAFVKVDIG

SEQ ID NO: 1465 - DNA, 147 bp, Sphingobium yanoikuyae
  CDS (1)..(147)
atgaaacagtcggttcaatccggttcgtccgatctgcgccccgcgaaccgtgcgatcgcgctgggcaaggcccgcaagctgacccgcgccagcttttcgggctcgcagccggagatgatcctcgaccgcgaatatacggtcggcggc

SEQ ID NO: 1466 - protein, 49 aa, Sphingobium yanoikuyae
MKQSVQSGSSDLRPANRAIALGKARKLTRASFSGSQPEMILDREYTVGG

SEQ ID NO: 1467 - DNA, 114 bp, Actinomyces sp.
  CDS (1)..(114)
atgatcgaagagatcgccgattacaccgacaccactcgggggtactacctcggttgggccgacgccttcggcggcggtttcggaggcggccgttggtaccccctgccctggtgg

SEQ ID NO: 1468 - protein, 38 aa, Actinomyces sp.
MIEEIADYTDTTRGYYLGWADAFGGGFGGGRWYPLPWW

SEQ ID NO: 1469 - DNA, 126 bp, Actinomyces sp.
  CDS (1)..(126)
atggctacttacgtttcccccgcgattgagcagatcgccgactacaccgacactacccgtggctggttgcacggaccgtggagggacattttcggcggtcgagcctttgtcagggtcacggtcgcg

SEQ ID NO: 1470 - protein, 42 aa, Actinomyces sp.
MATYVSPAIEQIADYTDTTRGWLHGPWRDIFGGRAFVRVTVA

SEQ ID NO: 1471 - DNA, 135 bp, Actinomyces sp.
  CDS (1)..(135)
atggctacttacgtttcccccgcaatcgagcagatcgccgactacaccgacactacccgtggctggtaccgcgggccctggacggacgttttcggcggccgcgccattgttaaggttgatgtcgcaaggccctgg

SEQ ID NO: 1472 - protein, 45 aa, Actinomyces sp.
MATYVSPAIEQIADYTDTTRGWYRGPWTDVFGGRAIVKVDVARPW

SEQ ID NO: 1473 - DNA, 117 bp, Actinomyces sp.
  CDS (1)..(117)
atggctacttacgtttcccccgcgatcgagcagatcgccgactacgccgaagcgacccgcggttggttctacggaccgctgcgtgactttatcggcgggcgaggacgcatcgtcctc

SEQ ID NO: 1474 - protein, 39 aa, Actinomyces sp.
MATYVSPAIEQIADYAEATRGWFYGPLRDFIGGRGRIVL

SEQ ID NO: 1475 - DNA, 138 bp, Actinomyces sp.
  CDS (1)..(138)
atggctacttacgtttcccccgcgattgagcagatcgccgactacaccgttgcgacccagggattcattcccggcccattccgtgacatcttcggcggccgcggcaacatcatcttctcaaacgggaacctctccagc

SEQ ID NO: 1476 - protein, 46 aa, Actinomyces sp.
MATYVSPAIEQIADYTVATQGFIPGPFRDIFGGRGNIIFSNGNLSS

SEQ ID NO: 1477 - DNA, 126 bp, Hyphomonas oceanitis
  CDS (1)..(126)
atgtatacgaattcagatgaccatcaggaagaattccttgatttgatcgaacttggctcagtctccgaagagacccgtgggcaacccaacgggctcattgagttcttcggccagagctcacgcgac

SEQ ID NO: 1478 - protein, 42 aa, Hyphomonas oceanitis
MYTNSDDHQEEFLDLIELGSVSEETRGQPNGLIEFFGQSSRD

SEQ ID NO: 1479 - DNA, 147 bp, Candidatus Odyssella thessalonicensis
  CDS (1)..(147)
atggtaaaaagttttttcaataaattagataaaaacgaacacgcaggccttataaatatatctcagtctgcatcaactatcactgctggaggttgtggagcgaaatttgagcaaggcggagtgacctcattgcaaaagtttgatgcc

SEQ ID NO: 1480 - protein, 49 aa, Candidatus Odyssella thessalonicensis
MVKSFFNKLDKNEHAGLINISQSASTITAGGCGAKFEQGGVTSLQKFDA

SEQ ID NO: 1481 - DNA, 123 bp, Paenibacillus alvei
  CDS (1)..(123)
atgacaaacgttgtttactctaaaccaacaattgagaaagttgctagttttaaagagtctactaaagggatttggtttggtagatacagagatgttcttggtggtcgtgctttaactagaata

SEQ ID NO: 1482 - protein, 41 aa, Paenibacillus alvei
MTNVVYSKPTIEKVASFKESTKGIWFGRYRDVLGGRALTRI

SEQ ID NO: 1483 - DNA, 150 bp, Stenotrophomonas maltophilia
  CDS (1)..(150)
atgaacgaactgattgagctgggcgtagtggctggtgagcagaatcacgaagatcagagtgaactgatcgagctgggctcggtggtttccgaaacgaaggcgcacaaccacggcacgttgtgggatggcgtcttcccgaccacctcgccc

SEQ ID NO: 1484 - protein, 50 aa, Stenotrophomonas maltophilia
MNELIELGVVAGEQNHEDQSELIELGSVVSETKAHNHGTLWDGVFPTTSP

SEQ ID NO: 1485 - DNA, 150 bp, Stenotrophomonas maltophilia; identical to SEQ ID NO: 1483
  CDS (1)..(150)

SEQ ID NO: 1486 - protein, 50 aa, Stenotrophomonas maltophilia; identical to SEQ ID NO: 1484

SEQ ID NO: 1487 - DNA, 150 bp, Stenotrophomonas maltophilia; identical to SEQ ID NO: 1483
  CDS (1)..(150)

SEQ ID NO: 1488 - protein, 50 aa, Stenotrophomonas maltophilia; identical to SEQ ID NO: 1484

SEQ ID NO: 1489 - DNA, 132 bp, Sphingomonas sp.
  CDS (1)..(132)
atgacggatcgtgaagaccgcaacgacgacgtgatcgatctcggccgcatggtcgacgagacgaagggcggcggcgtcagaaatgacgacgggctcggcctggagcaaatccaggcggggctgtccgacgat

SEQ ID NO: 1490 - protein, 44 aa, Sphingomonas sp.
MTDREDRNDDVIDLGRMVDETKGGGVRNDDGLGLEQIQAGLSDD

SEQ ID NO: 1491 - DNA, 150 bp, Stenotrophomonas maltophilia
  CDS (1)..(150)
atgaacgaactgattgagctgggcgtagtggctgttgagcagaatcacgaagatcagagtgaactgatcgagctgggctcggtggtttccgaaacgaaggcgcacaaccacggcacgttgtgggatggcgtcttcccgaccacctcgccc

SEQ ID NO: 1492 - protein, 50 aa, Stenotrophomonas maltophilia
MNELIELGVVAVEQNHEDQSELIELGSVVSETKAHNHGTLWDGVFPTTSP

SEQ ID NO: 1493 - DNA, 219 bp, Streptomyces sp.
  CDS (1)..(219)
atgaagcagcagcagacgaccgtcccggtctgcaccgcgcctgtcgtgctggacgtcggttccaccagggtcgtgagcggctggctcagccccgctggcgccccgccgtatgagccaccggccgcgacccgggtcggaacgctggtctcgctggctgccggaagctactccgagggccagcaggacgacggcgactaccacaccaccaagtggcacgcc

SEQ ID NO: 1494 - protein, 73 aa, Streptomyces sp.
MKQQQTTVPVCTAPVVLDVGSTRVVSGWLSPAGAPPYEPPAATRVGTLVSLAAGSYSEGQQDDGDYHTTKWHA

SEQ ID NO: 1495 - DNA, 150 bp, Stenotrophomonas maltophilia
  CDS (1)..(150)
atgaacgaactggttgagctgggcgtagtggctggagagcagaatcacgaagaccagggtgaactgatcgagctgggctcggtggtttccgaaacgaaggcgcacaaccacggcacgttgtgggatggcgtcttcccgaccacctcgccc

SEQ ID NO: 1496 - protein, 50 aa, Stenotrophomonas maltophilia
MNELVELGVVAGEQNHEDQGELIELGSVVSETKAHNHGTLWDGVFPTTSP

SEQ ID NO: 1497 - DNA, 150 bp, Stenotrophomonas maltophilia
  CDS (1)..(150)
atgaacgaactgattgagctgggcgtagtggctggagagcagaatcacgaagaccagggtgaactgatcgagctgggctcggtggtttccgaaacgaaggcgcacaaccacggcacgttgtgggatggcgtcttcccgaccacctcgccc

SEQ ID NO: 1498 - protein, 50 aa, Stenotrophomonas maltophilia
MNELIELGVVAGEQNHEDQGELIELGSVVSETKAHNHGTLWDGVFPTTSP

SEQ ID NO: 1499 - DNA, 150 bp, Stenotrophomonas maltophilia
  CDS (1)..(150)
atgaacgaactgattgagctgggcgtagtggctggagagcagaatcacgaagatccgagtgaactgatcgagctgggctcggtggtttccgaaacgaaggcgcacaaccacggcacgttgtgggatggcgtcttcccgaccacctcgccc

SEQ ID NO: 1500 - protein, 50 aa, Stenotrophomonas maltophilia
MNELIELGVVAGEQNHEDPSELIELGSVVSETKAHNHGTLWDGVFPTTSP

SEQ ID NO: 1501 - DNA, 165 bp, Streptomyces sp.
  CDS (1)..(165)
atgcaggacacgcacgaggtgccgaccgtccccgacatcaccggcaccaccgccaccgccaccgactacgagccgccgcagctcgtcgaggtgggcaacttcaccgagctgacgctcggctacaccggctaccactgggacggctgggccggcttcttcgggtgg

SEQ ID NO: 1502 - protein, 55 aa, Streptomyces sp.
MQDTHEVPTVPDITGTTATATDYEPPQLVEVGNFTELTLGYTGYHWDGWAGFFGW

SEQ ID NO: 1503 - DNA, 153 bp, Hyphomonas atlantica
  CDS (1)..(153)
atgaacagccccacacaatgcccacacacaccagcgccggacggcgagaccgagaccctgatcgatctcggcgcagcgtcggaagaaacccgcggccgcatcctgcagcccatggagttcggcgtctcgtttacctcccgcgatgaagccggc

SEQ ID NO: 1504 - protein, 51 aa, Hyphomonas atlantica
MNSPTQCPHTPAPDGETETLIDLGAASEETRGRILQPMEFGVSFTSRDEAG

SEQ ID NO: 1505 - DNA, 150 bp, Stenotrophomonas maltophilia; identical to SEQ ID NO: 1499
  CDS (1)..(150)

SEQ ID NO: 1506 - protein, 50 aa, Stenotrophomonas maltophilia; identical to SEQ ID NO: 1500

SEQ ID NO: 1507 - DNA, 150 bp, Stenotrophomonas maltophilia; identical to SEQ ID NO: 1483
  CDS (1)..(150)

SEQ ID NO: 1508 - protein, 50 aa, Stenotrophomonas maltophilia; identical to SEQ ID NO: 1484

SEQ ID NO: 1509 - DNA, 150 bp, Stenotrophomonas maltophilia; identical to SEQ ID NO: 1483
  CDS (1)..(150)

SEQ ID NO: 1510 - protein, 50 aa, Stenotrophomonas maltophilia; identical to SEQ ID NO: 1484

SEQ ID NO: 1511 - DNA, 138 bp, Cylindrospermum stagnale
  CDS (1)..(138)
atgacaacgctaaatccaacaaaaaaacagtactctcagcctgaaattattgagataggtgatgcagttagaacaactttaggtcatcatcgttggggacgtcgagaacaccaccgccgttactactaccgttggcac

SEQ ID NO: 1512 - protein, 46 aa, Cylindrospermum stagnale
MTTLNPTKKQYSQPEIIEIGDAVRTTLGHHRWGRREHHRRYYYRWH

SEQ ID NO: 1513 - DNA, 135 bp, Enterococcus faecalis; identical to SEQ ID NO: 1417
  CDS (1)..(135)

SEQ ID NO: 1514 - protein, 45 aa, Enterococcus faecalis; identical to SEQ ID NO: 1418

SEQ ID NO: 1515 - DNA, 99 bp, Robbsia andropogonis
  CDS (1)..(99)
atggaactacaaggcgtcgtcgcgacgcacgctacccaaggcttaatcggtctcgtgccggaaagcagcaccggctatttccttttcgagggaggccaa

SEQ ID NO: 1516 - protein, 33 aa, Robbsia andropogonis
MELQGVVATHATQGLIGLVPESSTGYFLFEGGQ

SEQ ID NO: 1517 - DNA, 96 bp, Robbsia andropogonis
  CDS (1)..(96)
atgcttgccccatcggacgtcgttggccttgccgcctgcggcgagacgcagggcggatccggtcaatacagggaagccggcgtcggtcgcttttta

SEQ ID NO: 1518 - protein, 32 aa, Robbsia andropogonis
MLAPSDVVGLAACGETQGGSGQYREAGVGRFL

SEQ ID NO: 1519 - DNA, 108 bp, Robbsia andropogonis
  CDS (1)..(108)
atggacgcacgttacctacaaggcgtcgtcgcgacccacgccacccaaggcttgatcggtctcgtgccggaaagtggccatggcctcttcttgttagaaggcagtcaa

SEQ ID NO: 1520 - protein, 36 aa, Robbsia andropogonis
MDARYLQGVVATHATQGLIGLVPESGHGLFLLEGSQ

SEQ ID NO: 1521 - DNA, 123 bp, Paenibacillus alvei; identical to SEQ ID NO: 1481
  CDS (1)..(123)

SEQ ID NO: 1522 - protein, 41 aa, Paenibacillus alvei; identical to SEQ ID NO: 1482

SEQ ID NO: 1523 - DNA, 129 bp, Hyphomonadaceae bacterium
  CDS (1)..(129)
atgaaacaggaaaagctgatcccggaagaattcgagcccgttgaactcggttccgtctcggaagaaacgcgcggttcgttcggactcgcccaggaaaacggcgaactgccgttcacccggcagatcgtc

SEQ ID NO: 1524 - protein, 43 aa, Hyphomonadaceae bacterium
MKQEKLIPEEFEPVELGSVSEETRGSFGLAQENGELPFTRQIV

SEQ ID NO: 1525 - DNA, 126 bp, Streptococcus sp.
  CDS (1)..(126)
atgaaatataataaacctatatttgaaaaagtagcaaactttaaaaaagatactaatggtctttggtttggtaagtttactgatatttttggtggtcgtgcagtatttcaaattgttattaattat

SEQ ID NO: 1526 - protein, 42 aa, Streptococcus sp.
MKYNKPIFEKVANFKKDTNGLWFGKFTDIFGGRAVFQIVINY

SEQ ID NO: 1527 - DNA, 141 bp, Hyphomonas sp.
  CDS (1)..(141)
atgaccccaacgaatgaaagaaatcagcctcaggacgaattcgagccgatcgaactcggttccgtttcttcggaaaccaagggtgaggttgctggccgggccgagctctccggttcgcagaactcccggccggaaatcggc

SEQ ID NO: 1528 - protein, 47 aa, Hyphomonas sp.
MTPTNERNQPQDEFEPIELGSVSSETKGEVAGRAELSGSQNSRPEIG

SEQ ID NO: 1529 - DNA, 111 bp, Hyphomonas jannaschiana
  CDS (1)..(111)
atggacgaattcgacccgatcgaactcggttccgtttcttcggaaaccaagggcgcagctgagggcccggccgagctctcaggctcgcagaattcccgccccggaattggt

SEQ ID NO: 1530 - protein, 37 aa, Hyphomonas jannaschiana
MDEFDPIELGSVSSETKGAAEGPAELSGSQNSRPGIG

SEQ ID NO: 1531 - DNA, 120 bp, Streptococcus suis
  CDS (1)..(120)
atgaattatacaaagccagttatagaaaaaatttctacttttaaaaatggtactgcaggattagttgcaggtagcttcagagatatatttggaggcagggctttatttttaattaaaata

SEQ ID NO: 1532 - protein, 40 aa, Streptococcus suis
MNYTKPVIEKISTFKNGTAGLVAGSFRDIFGGRALFLIKI

SEQ ID NO: 1533 - DNA, 126 bp, Streptococcus suis
  CDS (1)..(126)
atgaaatgttgcaagccaacatttgaatcaattgcaactttcaaaaaagacactaaaggtctatggactggtaagtttcgtgatgtctttggtggacgtgcacttataaaagttacagttgagttc

SEQ ID NO: 1534 - protein, 42 aa, Streptococcus suis
MKCCKPTFESIATFKKDTKGLWTGKFRDVFGGRALIKVTVEF

SEQ ID NO: 1535 - DNA, 102 bp, Allosalinactinospora lopnorensis
  CDS (1)..(102)
atggtggtcgaggtcggcgacttcaccgagatcacacggggtcagtacgcctccgaacacgccgacgacggtgacggcgccgggtactggtcacaaccagtc

SEQ ID NO: 1536 - protein, 34 aa, Allosalinactinospora lopnorensis
MVVEVGDFTEITRGQYASEHADDGDGAGYWSQPV

SEQ ID NO: 1537 - DNA, 120 bp, Streptococcus suis; identical to SEQ ID NO: 1531
  CDS (1)..(120)

SEQ ID NO: 1538 - protein, 40 aa, Streptococcus suis; identical to SEQ ID NO: 1532

SEQ ID NO: 1539 - DNA, 126 bp, Streptococcus suis; identical to SEQ ID NO: 1533
  CDS (1)..(126)

SEQ ID NO: 1540 - protein, 42 aa, Streptococcus suis; identical to SEQ ID NO: 1534

SEQ ID NO: 1541 - DNA, 141 bp, Rubidibacter lacunae
  CDS (1)..(141)
atgcagacttcaattgattcgaagaaacagtatcaggagccgcgcatcgtttgcgtaggtgatgcagtcaaaatgactcttagttttggtcagtctctcattagagacgctagatggcgttttccaattgacccctccgca

SEQ ID NO: 1542 - protein, 47 aa, Rubidibacter lacunae
MQTSIDSKKQYQEPRIVCVGDAVKMTLSFGQSLIRDARWRFPIDPSA

SEQ ID NO: 1543 - DNA, 90 bp, Unknown
  Description of Unknown: Sphingomonas-like bacterium sequence
  CDS (1)..(90)
atgcttggcaagattcggcgcgtgacccgcgcgtcggatcgtcccggtacgccggagctcggcaatcccgtgctgagctttcagatcggc

SEQ ID NO: 1544 - protein, 30 aa, Unknown
  Description of Unknown: Sphingomonas-like bacterium sequence
MLGKIRRVTRASDRPGTPELGNPVLSFQIG

SEQ ID NO: 1545 - DNA, 120 bp, Streptococcus suis; identical to SEQ ID NO: 1531
  CDS (1)..(120)

SEQ ID NO: 1546 - protein, 40 aa, Streptococcus suis; identical to SEQ ID NO: 1532

SEQ ID NO: 1547 - DNA, 126 bp, Streptococcus suis; identical to SEQ ID NO: 1533
  CDS (1)..(126)

SEQ ID NO: 1548 - protein, 42 aa, Streptococcus suis; identical to SEQ ID NO: 1534

SEQ ID NO: 1549 - DNA, 120 bp, Lactococcus garvieae
  CDS (1)..(120)
atgaattatacgaagccagttatagaaaaaatttctacttttaaaaacggtacagcaggattagttgcaggtagcttcagagatatatttggtggcagggctttatttttaattagaata

SEQ ID NO: 1550 - protein, 40 aa, Lactococcus garvieae
MNYTKPVIEKISTFKNGTAGLVAGSFRDIFGGRALFLIRI

SEQ ID NO: 1551 - DNA, 126 bp, Lactococcus garvieae
  CDS (1)..(126)
atgaaatattgcaaaccaacatttgaatcaattgcaactttcaaaaaagacactaaaggtctatggactggtaagtttcgtgatgtctttggtggacgtgcaattgtaagagttacaattgagttc

SEQ ID NO: 1552 - protein, 42 aa, Lactococcus garvieae
MKYCKPTFESIATFKKDTKGLWTGKFRDVFGGRAIVRVTIEF

SEQ ID NO: 1553 - DNA, 120 bp, Streptococcus suis; identical to SEQ ID NO: 1531
  CDS (1)..(120)

SEQ ID NO: 1554 - protein, 40 aa, Streptococcus suis; identical to SEQ ID NO: 1532

SEQ ID NO: 1555 - DNA, 126 bp, Streptococcus suis; identical to SEQ ID NO: 1533
  CDS (1)..(126)

SEQ ID NO: 1556 - protein, 42 aa, Streptococcus suis; identical to SEQ ID NO: 1534

SEQ ID NO: 1557 - DNA, 120 bp, Lactococcus garvieae; identical to SEQ ID NO: 1549
  CDS (1)..(120)

SEQ ID NO: 1558 - protein, 40 aa, Lactococcus garvieae; identical to SEQ ID NO: 1550

SEQ ID NO: 1559 - DNA, 126 bp, Streptococcus suis
  CDS (1)..(126)
atgaaatattgcaaaccaacatttgaatcaattgcaactttcaaaaaagacactaaaggtctatggactggtaagtttcgtgatgtctttggtggatgtgcaattgtaagagttacaattgagttc

SEQ ID NO: 1560 - protein, 42 aa, Streptococcus suis
MKYCKPTFESIATFKKDTKGLWTGKFRDVFGGCAIVRVTIEF

SEQ ID NO: 1561 - DNA, 126 bp, Fusobacterium necrophorum
  CDS (1)..(126)
atgaagtacagtaaacctactattgaaaaaattgctgatttcaaaaacgatactaatggtatctggtttggacgctttgttgacatctttggcggacgtgcagttgtgaaaatcactattcaatat

SEQ ID NO: 1562 - protein, 42 aa, Fusobacterium necrophorum
MKYSKPTIEKIADFKNDTNGIWFGRFVDIFGGRAVVKITIQY

SEQ ID NO: 1563 - DNA, 126 bp, Streptococcus pneumoniae
  CDS (1)..(126)
atgaaatattgcaaaccaacatttgaatcaattgcaactttcaaaaaagacactaaaggtctatggactggtaagtttcgtgatatctttggtggacgtgcaattgtaagaattagaattgagttt

SEQ ID NO: 1564 - protein, 42 aa, Streptococcus pneumoniae
MKYCKPTFESIATFKKDTKGLWTGKFRDIFGGRAIVRIRIEF

SEQ ID NO: 1565 - DNA, 126 bp, Streptococcus pneumoniae; identical to SEQ ID NO: 1563
  CDS (1)..(126)

SEQ ID NO: 1566 - protein, 42 aa, Streptococcus pneumoniae; identical to SEQ ID NO: 1564

SEQ ID NO: 1567 - DNA, 126 bp, Streptococcus pneumoniae; identical to SEQ ID NO: 1563
  CDS (1)..(126)

SEQ ID NO: 1568 - protein, 42 aa, Streptococcus pneumoniae; identical to SEQ ID NO: 1564

SEQ ID NO: 1569 - DNA, 126 bp, Streptococcus pneumoniae; identical to SEQ ID NO: 1563
  CDS (1)..(126)

SEQ ID NO: 1570 - protein, 42 aa, Streptococcus pneumoniae; identical to SEQ ID NO: 1564

SEQ ID NO: 1571 - DNA, 126 bp, Streptococcus pneumoniae; identical to SEQ ID NO: 1563
  CDS (1)..(126)

SEQ ID NO: 1572 - protein, 42 aa, Streptococcus pneumoniae; identical to SEQ ID NO: 1564

SEQ ID NO: 1573 - DNA, 120 bp, Lactococcus garvieae; identical to SEQ ID NO: 1549
  CDS (1)..(120)

SEQ ID NO: 1574 - protein, 40 aa, Lactococcus garvieae; identical to SEQ ID NO: 1550

SEQ ID NO: 1575 - DNA, 126 bp, Lactococcus garvieae; identical to SEQ ID NO: 1551
  CDS (1)..(126)

SEQ ID NO: 1576 - protein, 42 aa, Lactococcus garvieae; identical to SEQ ID NO: 1552

SEQ ID NO: 1577 - DNA, 126 bp, Streptococcus pneumoniae; identical to SEQ ID NO: 1563
  CDS (1)..(126)

SEQ ID NO: 1578 - protein, 42 aa, Streptococcus pneumoniae; identical to SEQ ID NO: 1564

SEQ ID NO: 1579 - DNA, 126 bp, Streptococcus pneumoniae
  CDS (1)..(126)
atgaaatattgcaaaccaacatttgaatcaattgcaactttcaaaaaagacactaaaagtctatggactggtaagtttcgtgatatctttggtggacgtgcaattgtaagaattagaattgagttt

SEQ ID NO: 1580 - protein, 42 aa, Streptococcus pneumoniae
MKYCKPTFESIATFKKDTKSLWTGKFRDIFGGRAIVRIRIEF

SEQ ID NO: 1581 - DNA, 120 bp, Streptococcus salivarius
  CDS (1)..(120)
atgaattatacgaagccagttatagagaaaatttctacttttaaaagtggtacttcaggattagtcgcaggtaggttcagagatatatttggtggcagggctttatttttaattagaata

SEQ ID NO: 1582 - protein, 40 aa, Streptococcus salivarius
MNYTKPVIEKISTFKSGTSGLVAGRFRDIFGGRALFLIRI

SEQ ID NO: 1583 - DNA, 126 bp, Streptococcus salivarius
  CDS (1)..(126)
atgaaatattgcaaaccaacatttgaaccaattgcaactttcaaaaaagacactaaaggtctatggactggtaattttcgtgatgtctttggtggacgtgcaatcgtaagagttaaaattgagttc

SEQ ID NO: 1584 - protein, 42 aa, Streptococcus salivarius
MKYCKPTFEPIATFKKDTKGLWTGNFRDVFGGRAIVRVKIEF

SEQ ID NO: 1585 - DNA, 126 bp, Ruminococcus flavefaciens
  CDS (1)..(126)
atgacatacaataagccaagctttgagaaggttgcttctttcaagaacagcacaatgggtctttggacaggtaagtggactgacattttcggtggtagagcaatcatcaagatcgaaatcggtttc

SEQ ID NO: 1586 - protein, 42 aa, Ruminococcus flavefaciens
MTYNKPSFEKVASFKNSTMGLWTGKWTDIFGGRAIIKIEIGF

SEQ ID NO: 1587 - DNA, 126 bp, Ruminococcus flavefaciens
  CDS (1)..(126)
atgacatacaataagccaagctttgagaaggttgcttctttcaagaataaaacaatgggcctttggttcggcaattttaaggatctcttcggcggaaagatatacattgctcttagtcctgcatgg

SEQ ID NO: 1588 - protein, 42 aa, Ruminococcus flavefaciens
MTYNKPSFEKVASFKNKTMGLWFGNFKDLFGGKIYIALSPAW

SEQ ID NO: 1589 - DNA, 123 bp, Ruminococcus flavefaciens
  CDS (1)..(123)
atgacatacaataagccaagcgttgaaaaggtcgcttcattcaaggataacacaatgggtctttggtacggtaaatttcgtgacattttcggtgctaaaacatactttaatttagcatggaat

SEQ ID NO: 1590 - protein, 41 aa, Ruminococcus flavefaciens
MTYNKPSVEKVASFKDNTMGLWYGKFRDIFGAKTYFNLAWN

SEQ ID NO: 1591 - DNA, 120 bp, Ruminococcus flavefaciens
  CDS (1)..(120)
atgacatacagcaagccaaaatttgaacaaattgcttctttcaagaaagatacactgggtattttatttggtaagaaattagacgttttcggttctaagggtatttttatttgggattta

SEQ ID NO: 1592 - protein, 40 aa, Ruminococcus flavefaciens
MTYSKPKFEQIASFKKDTLGILFGKKLDVFGSKGIFIWDL

SEQ ID NO: 1593 - DNA, 126 bp, Ruminococcus flavefaciens
  CDS (1)..(126)
atgacatacaataagccaagctttgagaaggttgcttctttcaagaacagcacaatgggtctttgtttcggtaaatggaatgacattttcggtggtagagcaatcatcaagatcgaaatcggtttc

SEQ ID NO: 1594 - protein, 42 aa, Ruminococcus flavefaciens
MTYNKPSFEKVASFKNSTMGLCFGKWNDIFGGRAIIKIEIGF

SEQ ID NO: 1595 - DNA, 120 bp, Ruminococcus flavefaciens
  CDS (1)..(120)
atgacatacaataagccaagctttgagaaggttgcttctttcaaggataacacaatgggtgtttggttcggtaagtggactgacattttcggtggtagagcattcattcacgttgaatgg

SEQ ID NO: 1596 - protein, 40 aa, Ruminococcus flavefaciens
MTYNKPSFEKVASFKDNTMGVWFGKWTDIFGGRAFIHVEW

SEQ ID NO: 1597 - DNA, 108 bp, Streptomyces sp.; identical to SEQ ID NO: 619
  CDS (1)..(108)

SEQ ID NO: 1598 - protein, 36 aa, Streptomyces sp.; identical to SEQ ID NO: 620

SEQ ID NO: 1599 - DNA, 126 bp, Ruminococcus albus
  CDS (1)..(126)
atgacatacaacaagcctagctttgagaagatttcttctttcaaggagagtacaatgggtgtttggttcggtaagttcaaggacattttcggtggtaaagccgttgttgaaatcgtaatttactat

SEQ ID NO: 1600 - protein, 42 aa, Ruminococcus albus
MTYNKPSFEKISSFKESTMGVWFGKFKDIFGGKAVVEIVIYY

SEQ ID NO: 1601 - DNA, 126 bp, Ruminococcus albus; identical to SEQ ID NO: 1599
  CDS (1)..(126)

SEQ ID NO: 1602 - protein, 42 aa, Ruminococcus albus; identical to SEQ ID NO: 1600

SEQ ID NO: 1603 - DNA, 126 bp, Bifidobacterium callitrichos
  CDS (1)..(126)
atgaaggattatgtgcctcctgtcgttgaggtcatcgcatcattcaaggaagcaaccaatggcgtatggttcggcaactatgtcgatgttggcggagccaaggccccgttcccttggggatcgaac

SEQ ID NO: 1604 - protein, 42 aa, Bifidobacterium callitrichos
MKDYVPPVVEVIASFKEATNGVWFGNYVDVGGAKAPFPWGSN

SEQ ID NO: 1605 - DNA, 126 bp, Bifidobacterium callitrichos; identical to SEQ ID NO: 1603
  CDS (1)..(126)

SEQ ID NO: 1606 - protein, 42 aa, Bifidobacterium callitrichos; identical to SEQ ID NO: 1604

SEQ ID NO: 1607 - DNA, 111 bp, Rothia aeria
  CDS (1)..(111)
atgtacaccaaagcaacgttcactaaaattacctctttccgggccgctactcatggatggtactgggggaatcgtcgtgatatttacggggccctccggtacgctaataag

SEQ ID NO: 1608 - protein, 37 aa, Rothia aeria
MYTKATFTKITSFRAATHGWYWGNRRDIYGALRYANK

SEQ ID NO: 1609 - DNA, 99 bp, Rothia aeria
  CDS (1)..(99)
atgaactcttttgcaaattgcactcatggcctcatatacgggaaataccgggatgttctctccggtgcccggcttgtgactcctcctgaagttgctcta

SEQ ID NO: 1610 - protein, 33 aa, Rothia aeria
MNSFANCTHGLIYGKYRDVLSGARLVTPPEVAL

SEQ ID NO: 1611 - DNA, 141 bp, Unknown
  Description of Unknown: Candidate division sequence
  CDS (1)..(141)
atgaaaaataataaacaacttcaaaaaaaagctgtgaaaaacgaagttaaagttactgatttgggaaaagtttcacttctcactttgggccgatgtacgaattcttcatgggaatgtcctcgtatgacgggtcctcgtttt

SEQ ID NO: 1612 - protein, 47 aa, Unknown
  Description of Unknown: Candidate division sequence
MKNNKQLQKKAVKNEVKVTDLGKVSLLTLGRCTNSSWECPRMTGPRF

SEQ ID NO: 1613 - DNA, 126 bp, Bifidobacterium longum
  CDS (1)..(126)
atgaaggattatgtacccccggccgttgaggtcatcgcatcattcaaggaagcaaccaatggcgtatggttcggcaactatgtcgatgttggcggcgccaaggccccgttcccttggggatcgaac

SEQ ID NO: 1614 - protein, 42 aa, Bifidobacterium longum
MKDYVPPAVEVIASFKEATNGVWFGNYVDVGGAKAPFPWGSN

SEQ ID NO: 1615 - DNA, 111 bp, Rothia aeria
  CDS (1)..(111)
atgtacaccaaagcaacgttcactaaaattacctctttccaggccgctactcatggatggtactgggggaatcgtcgtgatatttacggagccctccggtacgctaataag

SEQ ID NO: 1616 - protein, 37 aa, Rothia aeria
MYTKATFTKITSFQAATHGWYWGNRRDIYGALRYANK

SEQ ID NO: 1617 - DNA, 99 bp, Rothia aeria
  CDS (1)..(99)
atgaactcttttgcagattgcactcacggccttatatacgggaaataccgggatgttctctccggtgcccggcttgtgactccccctgaagttgctcta

SEQ ID NO: 1618 - protein, 33 aa, Rothia aeria
MNSFADCTHGLIYGKYRDVLSGARLVTPPEVAL

SEQ ID NO: 1619 - DNA, 111 bp, Rothia aeria; identical to SEQ ID NO: 1607
  CDS (1)..(111)

SEQ ID NO: 1620 - protein, 37 aa, Rothia aeria; identical to SEQ ID NO: 1608

SEQ ID NO: 1621 - DNA, 99 bp, Rothia aeria; identical to SEQ ID NO: 1609
  CDS (1)..(99)

SEQ ID NO: 1622 - protein, 33 aa, Rothia aeria; identical to SEQ ID NO: 1610

SEQ ID NO: 1623 - DNA, 129 bp, Nocardiopsis halophila
  CDS (1)..(129)
atggagcccgaggccgtcgtagtgccggacacctatgaaccgcccatggtggtggacatgggaccggtgcccgaagtgaccctcggcaagttcgccgaggactccaaggaccagaaccgctacttcgag

SEQ ID NO: 1624 - protein, 43 aa, Nocardiopsis halophila
MEPEAVVVPDTYEPPMVVDMGPVPEVTLGKFAEDSKDQNRYFE

SEQ ID NO: 1625 - DNA, 105 bp, Rothia dentocariosa
  CDS (1)..(105)
atgaaggtgaactcttttgcagattgcactcacggccttatatacgggaaataccgggatgttctctccggtgcccggcttgtgactcctcctgaagttgctcta

SEQ ID NO: 1626 - protein, 35 aa, Rothia dentocariosa
MKVNSFADCTHGLIYGKYRDVLSGARLVTPPEVAL

SEQ ID NO: 1627 - DNA, 96 bp, Rothia dentocariosa
  CDS (1)..(96)
atgttcactaaaattacttctttccaggccgctactcatggatggtactgggggaatcgtcgtgatatttacggagccctccggtacgctaataag

SEQ ID NO: 1628 - protein, 32 aa, Rothia dentocariosa
MFTKITSFQAATHGWYWGNRRDIYGALRYANK

SEQ ID NO: 1629 - DNA, 129 bp, Kitasatospora setae
  CDS (1)..(129)
atgcaggaactcaccccgctcgacggcgagccggagggggagaccgtggtcctcggcgacgcggcgctcctgaccaagggcagctcgaacaacagcgtcgaaggcaagcgctccccgtacgacgccggc

SEQ ID NO: 1630 - protein, 43 aa, Kitasatospora setae
MQELTPLDGEPEGETVVLGDAALLTKGSSNNSVEGKRSPYDAG

SEQ ID NO: 1631 - DNA, 126 bp, Bifidobacterium breve
  CDS (1)..(126)
atgaagcagtatatagcccctacggtggagaccatcgcttcgttccgcgaagccaccaatggcttatggttcggtaagtatgtcgatatcggcggagccaaggcaccgttcccttggggatcgaac

SEQ ID NO: 1632 - protein, 42 aa, Bifidobacterium breve
MKQYIAPTVETIASFREATNGLWFGKYVDIGGAKAPFPWGSN

SEQ ID NO: 1633 - DNA, 138 bp, Actinomyces sp.; identical to SEQ ID NO: 1475
  CDS (1)..(138)

SEQ ID NO: 1634 - protein, 46 aa, Actinomyces sp.; identical to SEQ ID NO: 1476

SEQ ID NO: 1635 - DNA, 114 bp, Actinomyces sp.; identical to SEQ ID NO: 1467
  CDS (1)..(114)

SEQ ID NO: 1636 - protein, 38 aa, Actinomyces sp.; identical to SEQ ID NO: 1468

SEQ ID NO: 1637 - DNA, 126 bp, Actinomyces sp.; identical to SEQ ID NO: 1469
  CDS (1)..(126)

SEQ ID NO: 1638 - protein, 42 aa, Actinomyces sp.; identical to SEQ ID NO: 1470

SEQ ID NO: 1639 - DNA, 135 bp, Actinomyces sp.; identical to SEQ ID NO: 1471
  CDS (1)..(135)

SEQ ID NO: 1640 - protein, 45 aa, Actinomyces sp.; identical to SEQ ID NO: 1472

SEQ ID NO: 1641 - DNA, 117 bp, Actinomyces sp.; identical to SEQ ID NO: 1473
  CDS (1)..(117)

SEQ ID NO: 1642 - protein, 39 aa, Actinomyces sp.; identical to SEQ ID NO: 1474

SEQ ID NO: 1643 - DNA, 126 bp, Bifidobacterium breve; identical to SEQ ID NO: 1631
  CDS (1)..(126)

SEQ ID NO: 1644 - protein, 42 aa, Bifidobacterium breve; identical to SEQ ID NO: 1632

SEQ ID NO: 1645 - DNA, 126 bp, Bifidobacterium callitrichos; identical to SEQ ID NO: 1603
  CDS (1)..(126)

SEQ ID NO: 1646 - protein, 42 aa, Bifidobacterium callitrichos; identical to SEQ ID NO: 1604

SEQ ID NO: 1647 - DNA, 141 bp, Burkholderia mallei; identical to SEQ ID NO: 47
  CDS (1)..(141)

SEQ ID NO: 1648 - protein, 47 aa, Burkholderia mallei; identical to SEQ ID NO: 48

SEQ ID NO: 1649 - DNA, 153 bp, Streptomyces sp.
  CDS (1)..(153)
atgaacgacccgaccgcacaccccgccacccccgtgtccccgacgaccgaacccgagctcgtcgacctcgtcgagctcggcggcctcatggccctgacccagggccagggcggcggccagagcgaggacaagcgtcgcgcctacaactgcgcc

SEQ ID NO: 1650 - protein, 51 aa, Streptomyces sp.
MNDPTAHPATPVSPTTEPELVDLVELGGLMALTQGQGGGQSEDKRRAYNCA

SEQ ID NO: 1651 - DNA, 138 bp, Nocardiopsis chromatogenes
  CDS (1)..(138)
atggagcccgagaccgcaggacccgcagaaccgccggacgcctacgagtcgcccatggtggtggacatggggtcggttccggaagcgacactcggcaagttcgccgaggacaccaaggaccagaaccgctacttcgag

SEQ ID NO: 1652 - protein, 46 aa, Nocardiopsis chromatogenes
MEPETAGPAEPPDAYESPMVVDMGSVPEATLGKFAEDTKDQNRYFE

SEQ ID NO: 1653 - DNA, 138 bp, Streptomyces celluloflavus
  CDS (1)..(138)
atgaagcacgctgagcggacgtccgaccagccgcagcaggtcgacgaagcacccgaggtgatcgtcctcgacaacgcggccgccctgacccagggcggatcgggcacgagcaccgaggacaagcgctaccagtacggc

SEQ ID NO: 1654 - protein, 46 aa, Streptomyces celluloflavus
MKHAERTSDQPQQVDEAPEVIVLDNAAALTQGGSGTSTEDKRYQYG

SEQ ID NO: 1655 - DNA, 120 bp, Amycolatopsis benzoatilytica
  CDS (1)..(120)
atggatgtggacacccagccctacgagccgccggagctgaccgacctcggcgaggtcaccgagttcaccctcggcaacgccgccgacgacacggctgacatgaacaccgcccgctactac

SEQ ID NO: 1656 - protein, 40 aa, Amycolatopsis benzoatilytica
MDVDTQPYEPPELTDLGEVTEFTLGNAADDTADMNTARYY

SEQ ID NO: 1657 - DNA, 114 bp, Allosalinactinospora lopnorensis
  CDS (1)..(114)
atgcaggtcgagacctacgagcctccgatggtgatcgaactgggagacgtccgcgagttgacgctcggctcggcggcgcacgacaccgccgacacgaacgtcgcccgctacaac

SEQ ID NO: 1658 - protein, 38 aa, Allosalinactinospora lopnorensis
MQVETYEPPMVIELGDVRELTLGSAAHDTADTNVARYN

SEQ ID NO: 1659 - DNA, 126 bp, Streptococcus pneumoniae; identical to SEQ ID NO: 1563
  CDS (1)..(126)

SEQ ID NO: 1660 - protein, 42 aa, Streptococcus pneumoniae; identical to SEQ ID NO: 1564

SEQ ID NO: 1661 - DNA, 219 bp, Streptomyces flavidovirens
  CDS (1)..(219)
atgaccttgctgagaaaatacgcccaacggtcggcggcccggctccggccctctgtttccgatactggtgctcagcaaccgcaaccactcgccgcggcggatctcgaccgcgacgactcttacgcccctccggtcgtggtcgatctcggtcatgtacgggaggtgactctcggaagctccagcagtggcaccgccgacgccaactcccattactactgg

SEQ ID NO: 1662 - protein, 73 aa, Streptomyces flavidovirens
MTLLRKYAQRSAARLRPSVSDTGAQQPQPLAAADLDRDDSYAPPVVVDLGHVREVTLGSSSSGTADANSHYYW

SEQ ID NO: 1663 - DNA, 123 bp, Citrobacter pasteurii
  CDS (1)..(123)
atgaaaaagcagacgtttgtacctaagaagttggtaaaagttggcaaagcgaccgaactaaccaaaggtggtgtaggtaagattattgaatactttattggcggcggcgttggtcgttatggt

SEQ ID NO: 1664 - protein, 41 aa, Citrobacter pasteurii
MKKQTFVPKKLVKVGKATELTKGGVGKIIEYFIGGGVGRYG

SEQ ID NO: 1665 - DNA, 144 bp, Streptomyces albus
  CDS (1)..(144)
atgaacgaccacaccgaggtcacgcagagcgccgagcctcgcccgagctacacctctccgcaactcatcgaactcgacgcggtgtcgaaggtgacgctcggcaagtacgccgaggacagcgccgaccagggccgctacttcgag

SEQ ID NO: 1666 - protein, 48 aa, Streptomyces albus
MNDHTEVTQSAEPRPSYTSPQLIELDAVSKVTLGKYAEDSADQGRYFE

SEQ ID NO: 1667 - DNA, 165 bp, Actinosynnema mirum
  CDS (1)..(165)
atggcgcttctgccggaacagtggaacgagcccccggagcacacgacggacgggaccccatcgggacacgacgcgcccgtgctgctgacctccatcggtgacatgtcctcggtgaccctcggccagggcaagggcagtgccgaggacaagcgccgggcctacaac

SEQ ID NO: 1668 - protein, 55 aa, Actinosynnema mirum
MALLPEQWNEPPEHTTDGTPSGHDAPVLLTSIGDMSSVTLGQGKGSAEDKRRAYN

SEQ ID NO: 1669 - DNA, 267 bp, Streptomyces lydicus
gtgttgccatcacggcccatccgggaccagaccccgcccccttgcggtcggcaaagcgaagtccgaccgtgcaggtgcggttgtcccactccatcgatagcagcggagaggaggaagaagttgactgaccacaacggtgagatacacacgacggcccacgctgaggacggcgagccgccagcggtgatcgtcctcggtgacgccgccacgctgacgcgaggcagtgatcagcaaggtatcgagaacaagcgcacaccctacgactgc

SEQ ID NO: 1670 - protein, 89 aa, Streptomyces lydicus
MLPSRPIRDQTPPPCGRQSEVRPCRCGCPTPSIAAERRKKLTDHNGEIHTTAHAEDGEPPAVIVLGDAATLTRGSDQQGIENKRTPYDC

SEQ ID NO: 1671 - DNA, 144 bp, Streptomyces albus; identical to SEQ ID NO: 1665
  CDS (1)..(144)

SEQ ID NO: 1672 - protein, 48 aa, Streptomyces albus; identical to SEQ ID NO: 1666

SEQ ID NO: 1673 - DNA, 126 bp, Kitasatospora setae
  CDS (1)..(126)
atgcaggaactcacccagctcgacggagaaccggaggaggagaccgtgctcctcggtgacgcggcgctcctgactaagggcagctcgaacaacagcgtggaagccaagcgctccccgtacgacgcc

SEQ ID NO: 1674 - protein, 42 aa, Kitasatospora setae
MQELTQLDGEPEEETVLLGDAALLTKGSSNNSVEAKRSPYDA

SEQ ID NO: 1675 - DNA, 267 bp, Streptomyces lydicus; identical to SEQ ID NO: 1669

SEQ ID NO: 1676 - protein, 89 aa, Streptomyces lydicus; identical to SEQ ID NO: 1670

SEQ ID NO: 1677 - DNA, 105 bp, Streptomyces niveus
  CDS (1)..(105)
atgttctacgaacccccggtggtcgtcgatctcggttctgtgcgggacgtgacgctggggagttccaccagcggtacggccgatgccaattcccagtactactgg

SEQ ID NO: 1678 - protein, 35 aa, Streptomyces niveus
MFYEPPVVVDLGSVRDVTLGSSTSGTADANSQYYW

SEQ ID NO: 1679 - DNA, 135 bp, Streptomyces sp.
  CDS (1)..(135)
atggacgacgtgtgcaccatcaccaccgcaggcgacgaggacgccgccgggctggtcgagatcggggacgcggccagcctcaccgagggccagggcggcggcaacagcgaggacaagcgtcgcgcctacaactcc

SEQ ID NO: 1680 - protein, 45 aa, Streptomyces sp.
MDDVCTITTAGDEDAAGLVEIGDAASLTEGQGGGNSEDKRRAYNS

SEQ ID NO: 1681 - DNA, 108 bp, Streptomyces bicolor; identical to SEQ ID NO: 723
  CDS (1)..(108)

SEQ ID NO: 1682 - protein, 36 aa, Streptomyces bicolor; identical to SEQ ID NO: 724

SEQ ID NO: 1683 - DNA, 144 bp, Streptomyces celluloflavus
  CDS (1)..(144)
atgtcgcagcagcacaccgcagcggacacggctaaggacgcagacccccttgccgctccgacggtcatcgttctgggcgacgctgccacgctgacgcgtggtagtgaccagaacagcaccgagtcgaagcagaacccgtacgac

SEQ ID NO: 1684 - protein, 48 aa, Streptomyces celluloflavus
MSQQHTAADTAKDADPLAAPTVIVLGDAATLTRGSDQNSTESKQNPYD

SEQ ID NO: 1685 - DNA, 126 bp, Streptomyces sp.
  CDS (1)..(126)
atggagaaccgctctcagctcgacaccgagccggaggaggaggtcgtgaccctggaggacgcgacgcgtctgacgaagggcaacaccaactccagcgtggagaacaagcgctcgccctacggggcc

SEQ ID NO: 1686 - protein, 42 aa, Streptomyces sp.
MENRSQLDTEPEEEVVTLEDATRLTKGNTNSSVENKRSPYGA

SEQ ID NO: 1687 - DNA, 141 bp, Frankia sp.; identical to SEQ ID NO: 869
  CDS (1)..(141)

SEQ ID NO: 1688 - protein, 47 aa, Frankia sp.; identical to SEQ ID NO: 870

SEQ ID NO: 1689 - DNA, 135 bp, Streptomyces sp.
  CDS (1)..(135)
atgaatgacctggtcgtcaccgaggacaccggcaacgaggacgatgtcgcgctggtccagatcggcgacgcggcggccctgacggaaggccagggcggcggtaacagcgaagacaagcgccgcgcctacaacagt

SEQ ID NO: 1690 - protein, 45 aa, Streptomyces sp.
MNDLVVTEDTGNEDDVALVQIGDAAALTEGQGGGNSEDKRRAYNS

SEQ ID NO: 1691 - DNA, 132 bp, Streptomyces griseoluteus
  CDS (1)..(132)
atgaacgaaccgctccgcaaggaggacatcccgacgcccgagccggacatggtcgatgtcggcgacatcgccgaactgaccgaggggcagggcggcggtcagtccgaggacaagcggcgcgcgtacaactgc

SEQ ID NO: 1692 - protein, 44 aa, Streptomyces griseoluteus
MNEPLRKEDIPTPEPDMVDVGDIAELTEGQGGGQSEDKRRAYNC

SEQ ID NO: 1693 - DNA, 201 bp, Streptomyces sp.
  CDS (1)..(201)
atgacctacgagcccattgccgtatccccgtacgaggatttcggatatccgcgacaagcggtgaaggccggggccgcgccctcccccgaggaaccggcggcctacgaaccgccgatggtggtcgacctggggcatgtccgtgaggtgacgctgggcagctcccccagcgggagtgccgacgccaatgcccagtactactac

SEQ ID NO: 1694 - protein, 67 aa, Streptomyces sp.
MTYEPIAVSPYEDFGYPRQAVKAGAAPSPEEPAAYEPPMVVDLGHVREVTLGSSPSGSADANAQYYY

SEQ ID NO: 1695 - DNA, 105 bp, Streptomyces niveus; identical to SEQ ID NO: 1677
  CDS (1)..(105)

SEQ ID NO: 1696 - protein, 35 aa, Streptomyces niveus; identical to SEQ ID NO: 1678

SEQ ID NO: 1697 - DNA, 144 bp, Streptomyces caatingaensis
  CDS (1)..(144)
atggagacgatcaaggccccggcctacatcgcgccggtggttctggacgccggttccgtcgccaaggtgacgctcggtaccgcgaacttcgacaccgacgacgacacccagtacaagacgagcaccaacgcgggcggcggtagc

SEQ ID NO: 1698 - protein, 48 aa, Streptomyces caatingaensis
METIKAPAYIAPVVLDAGSVAKVTLGTANFDTDDDTQYKTSTNAGGGS

SEQ ID NO: 1699 - DNA, 141 bp, Frankia sp.; identical to SEQ ID NO: 869
  CDS (1)..(141)

SEQ ID NO: 1700 - protein, 47 aa, Frankia sp.; identical to SEQ ID NO: 870

SEQ ID NO: 1701 - DNA, 138 bp, Amycolatopsis alba
  CDS (1)..(138)
atggaaaccgtgaacgaccaaccagagagcggtcagacgactgacgcgccggtgttgctggtcagcctcggcgaggcgtcggcggtgaccttggggcagggcaaaggcagctcggaggacaagcgacgggcctacaac

SEQ ID NO: 1702 - protein, 46 aa, Amycolatopsis alba
METVNDQPESGQTTDAPVLLVSLGEASAVTLGQGKGSSEDKRRAYN

SEQ ID NO: 1703 - DNA, 138 bp, Lechevalieria aerocolonigenes
  CDS (1)..(138)
atgaacaggtcaggtcagattcaggtggttgcagcgccggacgacgacccggagctgatggtcgagctcggcgacgtcgcggacctgacgctcggaggccctggggagggccgcgagaacaagcgccgcgaggtcggc

SEQ ID NO: 1704 - protein, 46 aa, Lechevalieria aerocolonigenes
MNRSGQIQVVAAPDDDPELMVELGDVADLTLGGPGEGRENKRREVG

SEQ ID NO: 1705 - DNA, 123 bp, Streptomyces hygroscopicus
  CDS (1)..(123)
atgggcgagaacaccaccccggtctaccaggcccccgtcgtcctcgacgccggcgccgtcgtcgtggtgacgctgggcaccaacaacttcgacaccgccgacgacaccgagtacaagaacgcc

SEQ ID NO: 1706 - protein, 41 aa, Streptomyces hygroscopicus
MGENTTPVYQAPVVLDAGAVVVVTLGTNNFDTADDTEYKNA

SEQ ID NO: 1707 - DNA, 132 bp, Streptomyces sp.
  CDS (1)..(132)
atgagcgaaacgcttcgcaaggaggacatcacggcgtccgagccggacacggtcgacatcggtgatgtcgccgagctgaccgaggggcagggcggagggcattccgaggacaagcggcgcgcgtacaactgc

SEQ ID NO: 1708 - protein, 44 aa, Streptomyces sp.
MSETLRKEDITASEPDTVDIGDVAELTEGQGGGHSEDKRRAYNC

SEQ ID NO: 1709 - DNA, 177 bp, Streptomyces flavochromogenes
  CDS (1)..(177)
atgaactctgcacaccagcaccgcgaccccgcacacgagaacgcctccgccgccgcggcggacgcgcgcgaccccgaactgctcctcgtcgacgccggatcggtgcgtgacgtcaccctcgggaactggtcgcacggccaccccgacgacacgcagcactggacgccgaccgacgac

SEQ ID NO: 1710 - protein, 59 aa, Streptomyces flavochromogenes
MNSAHQHRDPAHENASAAAADARDPELLLVDAGSVRDVTLGNWSHGHPDDTQHWTPTDD

SEQ ID NO: 1711 - DNA, 201 bp, Amycolatopsis mediterranei
gtgcggacagtgactggacgaagacggttcgccataacgtatcagggggcactcgtgaacgacgctgacgtcgacccgaacaccgtcctcatcgttcccgaggatggctacgagccaccggcggtattcgatttcggtccggtcttcaagaccacccgcgggaatggcaacggaagcgtggacaaaagcagccaggaagac

SEQ ID NO: 1712 - protein, 67 aa, Amycolatopsis mediterranei
MRTVTGRRRFAITYQGALVNDADVDPNTVLIVPEDGYEPPAVFDFGPVFKTTRGNGNGSVDKSSQED

SEQ ID NO: 1713 - DNA, 132 bp, Streptomyces sp.; identical to SEQ ID NO: 1707
  CDS (1)..(132)

SEQ ID NO: 1714 - protein, 44 aa, Streptomyces sp.; identical to SEQ ID NO: 1708

SEQ ID NO: 1715 - DNA, 156 bp, Actinopolyspora mortivallis
  CDS (1)..(156)
atggatggcgagatcgtggagtacccgcgtgatgatggtttcgagggcacgccactgcggtacgagacgcccgtgctggaagaggttggcgacgtggccatgctgaccaacggcacgtcgttcgatgacaccgctgaccgcaagcgctggtactac

SEQ ID NO: 1716 - protein, 52 aa, Actinopolyspora mortivallis
MDGEIVEYPRDDGFEGTPLRYETPVLEEVGDVAMLTNGTSFDDTADRKRWYY

SEQ ID NO: 1717 - DNA, 198 bp, Streptomyces glaucescens
  CDS (1)..(198)
atgttccatgagaaattgttcgagcagttgtccggctgcgctgccgatggcggaaacggaacgctcccggacgggccgcccccggaccaggacgccgcttatgtgtccccctccctcgtcgatctcggacacgtccgtgacctgacgttgggcagttccccgaacggcaacgccgacgccaacgcccagtactactgg

SEQ ID NO: 1718 - protein, 66 aa, Streptomyces glaucescens
MFHEKLFEQLSGCAADGGNGTLPDGPPPDQDAAYVSPSLVDLGHVRDLTLGSSPNGNADANAQYYW

SEQ ID NO: 1719 - DNA, 126 bp, Streptomyces ahygroscopicus
  CDS (1)..(126)
atgcccgagcagcagctgaacacattcgaggaggacgacgcggtgatcgtcgacctcggcgacgccgccaagctcaccgaaggccagggcggcggcaacagcgaggacaagcgccgcgcctacaac

SEQ ID NO: 1720 - protein, 42 aa, Streptomyces ahygroscopicus
MPEQQLNTFEEDDAVIVDLGDAAKLTEGQGGGNSEDKRRAYN

SEQ ID NO: 1721 - DNA, 207 bp, Unknown
  Description of Unknown: Uncultured bacterium sequence
  CDS (1)..(207)
atgaccttgctgagaaaatacgcccaacggtcggcggcccggccctctgattccgatactggtgctcagcaacatctcgccgcggcggatcccgaccgcgacgactcttacgcccccccggtcgtggtcgatctcggtcatgtacgggaggtgactctcggaagctccagcagtggcaccgccgacgccaactcccattactactgg

SEQ ID NO: 1722 - protein, 69 aa, Unknown
  Description of Unknown: Uncultured bacterium sequence
MTLLRKYAQRSAARPSDSDTGAQQHLAAADPDRDDSYAPPVVVDLGHVREVTLGSSSSGTADANSHYYW

SEQ ID NO: 1723 - DNA, 132 bp, Streptomyces sp.
  CDS (1)..(132)
atgaacccgcttcagaccacggagcacaccgacgagaacgacctgctccccgtcgagatcggtgaagcgaccgtgctcaccgagggccagggcggcggccagagcgaggacaagcgccgcgcctacaacagc

SEQ ID NO: 1724 - protein, 44 aa, Streptomyces sp.
MNPLQTTEHTDENDLLPVEIGEATVLTEGQGGGQSEDKRRAYNS

SEQ ID NO: 1725 - DNA, 132 bp, Streptomyces sp.; identical to SEQ ID NO: 1723
  CDS (1)..(132)

SEQ ID NO: 1726 - protein, 44 aa, Streptomyces sp.; identical to SEQ ID NO: 1724

SEQ ID NO: 1727 - DNA, 141 bp, Frankia sp.
  CDS (1)..(141)
atggtgacggttgacttccagccgcacgacggcccgacggaaaaggctccggtgctgctggtgagcctcggtgaggcgtcgatggtgacgctcggccagggcaagggcagcgcggaggacaagcggaaggcgtacaacagc

SEQ ID NO: 1728 - protein, 47 aa, Frankia sp.
MVTVDFQPHDGPTEKAPVLLVSLGEASMVTLGQGKGSAEDKRKAYNS

SEQ ID NO: 1729 - DNA, 111 bp, Nocardiopsis alkaliphila
  CDS (1)..(111)
atggaagaagcacgtgacgaggcaccggtcgtcatcgatctcggggacgcgaccgttctgacccagggcagcgacgaccagagtgtcgagagcaagcagtccccctatgac

SEQ ID NO: 1730 - protein, 37 aa, Nocardiopsis alkaliphila
MEEARDEAPVVIDLGDATVLTQGSDDQSVESKQSPYD

SEQ ID NO: 1731 - DNA, 150 bp, Kibdelosporangium sp.
gtgactgacgaccgggtcgaatcgcgccgcgacgatcagccgagtgagagtggttacgaacctcctgggatccatgatttcggcctggttcgggaagtcactcacggaagcaccggcggaagcggtgacgcgagcgcgcagaagttcgac

SEQ ID NO: 1732 - protein, 50 aa, Kibdelosporangium sp.
MTDDRVESRRDDQPSESGYEPPGIHDFGLVREVTHGSTGGSGDASAQKFD

SEQ ID NO: 1733 - DNA, 132 bp, Streptomyces sp.; identical to SEQ ID NO: 1723
  CDS (1)..(132)

SEQ ID NO: 1734 - protein, 44 aa, Streptomyces sp.; identical to SEQ ID NO: 1724

SEQ ID NO: 1735 - DNA, 135 bp, Streptomyces sp.
  CDS (1)..(135)
atgaacgtgaacgagcccgtcatcgtggccgacgaggacgacgacgtgaccgtgatcggcgacgcggcggccctcaccatgggcggccaggccgacggcggcgagggcaagcgccacgtgtactcgtacaccggc

SEQ ID NO: 1736 - protein, 45 aa, Streptomyces sp.
MNVNEPVIVADEDDDVTVIGDAAALTMGGQADGGEGKRHVYSYTG

SEQ ID NO: 1737 - DNA, 90 bp, Streptomyces sp.
  CDS (1)..(90)
atggtcgttgacctcggcgaactggtcgccctgaccctcggccagggcaagggcagcagcgaggacaagcgtcgcgcctacaaccaccac

SEQ ID NO: 1738 - protein, 30 aa, Streptomyces sp.
MVVDLGELVALTLGQGKGSSEDKRRAYNHH

SEQ ID NO: 1739 - DNA, 135 bp, Streptomyces albus
  CDS (1)..(135)
atggacagcctgctcagcaccgagaccgtcatctccgacgacgaactcctgccgatcgaggttggcggcaccgccgaactgaccgagggccagggcggaggccagagcgaggacaagcgacgcgcctacaactgc

SEQ ID NO: 1740 - protein, 45 aa, Streptomyces albus
MDSLLSTETVISDDELLPIEVGGTAELTEGQGGGQSEDKRRAYNC

SEQ ID NO: 1741 - DNA, 171 bp, Amycolatopsis nigrescens
  CDS (1)..(171)
atgaactttgcccaggtactccaggacaagccggtcaggccgcatgcgattaccgcgggggacgagcccgactacgaatcgccgttgctgatcgacctcgggcatgtccgggacgtcaccctcggcagttcgtccagcggcagcgccgacgcgaattcgcagtactactgg

SEQ ID NO: 1742 - protein, 57 aa, Amycolatopsis nigrescens
MNFAQVLQDKPVRPHAITAGDEPDYESPLLIDLGHVRDVTLGSSSSGSADANSQYYW

SEQ ID NO: 1743 - DNA, 144 bp, Rhodanobacter sp.; identical to SEQ ID NO: 519
  CDS (1)..(144)

SEQ ID NO: 1744 - protein, 48 aa, Rhodanobacter sp.; identical to SEQ ID NO: 520

SEQ ID NO: 1745 - DNA, 132 bp, Actinobacteria bacterium
  CDS (1)..(132)
atggacaccaccgacacgaccaccgagaccgagatctacaccgcgcccgtgctgagcgagctgggcaccgtcaccggggccaccctgggctcggccggcgcgaacaacgcggacgacacccagtactggcag

SEQ ID NO: 1746 - protein, 44 aa, Actinobacteria bacterium
MDTTDTTTETEIYTAPVLSELGTVTGATLGSAGANNADDTQYWQ

SEQ ID NO: 1747 - DNA, 126 bp, Nocardiopsis halotolerans
  CDS (1)..(126)
atggacaacgcgaaggctgaggatcaggagactcacgaggagctgttggtcgagctcggggacgccgccgaactgactctgggccaggggcgtgcccagaacgagaacaagcgcaacccctacaac

SEQ ID NO: 1748 - protein, 42 aa, Nocardiopsis halotolerans
MDNAKAEDQETHEELLVELGDAAELTLGQGRAQNENKRNPYN

SEQ ID NO: 1749 - DNA, 180 bp, Saccharothrix espanaensis
  CDS (1)..(180)
atgcgacggatccgcgcgcggtcgaccggcggaaatgacgcggcgaatgcgaattcaccggcagactcgggggacgcgcactacgagccccccgtcgtgatcgacatcggcgacgtgcggcgggtcaccctcggcagctcgtccagcggtaatgcggacgcgaattcccagtactactgg

SEQ ID NO: 1750 - protein, 60 aa, Saccharothrix espanaensis
MRRIRARSTGGNDAANANSPADSGDAHYEPPVVIDIGDVRRVTLGSSSSGNADANSQYYW

SEQ ID NO: 1751 - DNA, 114 bp, Streptomyces sp.
  CDS (1)..(114)
atgaagccggcgcaggtcgatgaccagccggacgtgatcaacctcggcgacgccgccacgctcacgcgtggcggtgaggaccagggcgtggagaacaagcgcgcaccgtacgac

SEQ ID NO: 1752 - protein, 38 aa, Streptomyces sp.
MKPAQVDDQPDVINLGDAATLTRGGEDQGVENKRAPYD

SEQ ID NO: 1753 - DNA, 132 bp, Actinobacteria bacterium; identical to SEQ ID NO: 1745
  CDS (1)..(132)

SEQ ID NO: 1754 - protein, 44 aa, Actinobacteria bacterium; identical to SEQ ID NO: 1746

SEQ ID NO: 1755 - DNA, 135 bp, Streptomyces albus; identical to SEQ ID NO: 1739
  CDS (1)..(135)

SEQ ID NO: 1756 - protein, 45 aa, Streptomyces albus; identical to SEQ ID NO: 1740

SEQ ID NO: 1757 - DNA, 135 bp, Kitasatospora sp.
  CDS (1)..(135)
atgaacgtgaacgagcccaccatcgcggccgacgaggacgacgacgtgaccgtgatcggcgacgccgcggccctcaccatgggcggcacctccgacggcggcgagggcaagcggcacgtgtaccagtacgccggc

SEQ ID NO: 1758 - protein, 45 aa, Kitasatospora sp.
MNVNEPTIAADEDDDVTVIGDAAALTMGGTSDGGEGKRHVYQYAG

SEQ ID NO: 1759 - DNA, 123 bp, Nocardiopsis alba
gtgaacgagaacaccccccagagctacgaggagcccgtcctgatcgacctgggcgacgcccgcgacctcacgctcggctccgctcaagaggacacggcggacctgaaccaggcccgctacaac

SEQ ID NO: 1760 - protein, 41 aa, Nocardiopsis alba
MNENTPQSYEEPVLIDLGDARDLTLGSAQEDTADLNQARYN

SEQ ID NO: 1761 - DNA, 180 bp, Saccharothrix espanaensis; identical to SEQ ID NO: 1749
  CDS (1)..(180)

SEQ ID NO: 1762 - protein, 60 aa, Saccharothrix espanaensis; identical to SEQ ID NO: 1750

SEQ ID NO: 1763 - DNA, 129 bp, Streptomyces sp.
  CDS (1)..(129)
atgaacgagatcatcaaggcgagcgaccccgacgagaacgaggagatcgtgcccctcggcgacgccgctgccctcacgaagggcagcaccagcgagagcatcgagaacaagcgctccccgtactccgcc

SEQ ID NO: 1764 - protein, 43 aa, Streptomyces sp.
MNEIIKASDPDENEEIVPLGDAAALTKGSTSESIENKRSPYSA

SEQ ID NO: 1765 - DNA, 162 bp, Streptomyces violaceusniger
  CDS (1)..(162)
atgaggacggatccgcccccgccgcgtgatcggcccgagggcgatggcccggccgtggccgtgagctacaccgcgccggtggtcgtcgaggtcggctcggtcgcgcagaccgtgcgcggcacccagtaccaggactcggccgacgacacgcagtacaagacc

SEQ ID NO: 1766 - protein, 54 aa, Streptomyces violaceusniger
MRTDPPPPRDRPEGDGPAVAVSYTAPVVVEVGSVAQTVRGTQYQDSADDTQYKT

SEQ ID NO: 1767 - DNA, 126 bp, Nocardiopsis dassonvillei
  CDS (1)..(126)
atggacaacacgaaggctgaggatcaggagactcacgaggagctgctggtcgaactcggggacgcggcagacctgacgctcggccagggccgggcccagaacgagaacaagcgcaacccctacaac

SEQ ID NO: 1768 - protein, 42 aa, Nocardiopsis dassonvillei
MDNTKAEDQETHEELLVELGDAADLTLGQGRAQNENKRNPYN

SEQ ID NO: 1769 - DNA, 108 bp, Altererythrobacter atlanticus
  CDS (1)..(108)
atggaacagctgggttcgttcgaaaccctgacccagggcggttcccagagcggctcgctcgactcgcagtatccgatcggtacgcccagcgaagtaggcgtgttctcc

SEQ ID NO: 1770 - protein, 36 aa, Altererythrobacter atlanticus
MEQLGSFETLTQGGSQSGSLDSQYPIGTPSEVGVFS

SEQ ID NO: 1771 - DNA, 141 bp, Sphingopyxis sp.
  CDS (1)..(141)
atgaatacaccccagaaactcgcctacaccaaacccgagctcgacgaagtcggttccttcgaggaagtgacgctcggcgcctcgaccggctccgccgtggacgggacgttcacgattgggcaaatcgcaaccttcctctcc

SEQ ID NO: 1772 - protein, 47 aa, Sphingopyxis sp.
MNTPQKLAYTKPELDEVGSFEEVTLGASTGSAVDGTFTIGQIATFLS

SEQ ID NO: 1773 - DNA, 144 bp, Thalassobius activus
  CDS (1)..(144)
atgaaaaaatcttatactgccccaacactaactccaaaaggtcgcgtcgaagaacttacacacgcgaacattccactgaacgttcgtctggacgcgccattctctggcggtgccggcagctcaacaactggcctgacctttaca

SEQ ID NO: 1774 - protein, 48 aa, Thalassobius activus
MKKSYTAPTLTPKGRVEELTHANIPLNVRLDAPFSGGAGSSTTGLTFT

SEQ ID NO: 1775 - DNA, 138 bp, Spirosoma spitsbergense
  CDS (1)..(138)
atgaaaacaaaggcagtacatatacaaatttcctcgcctaaaaaggcgtataagacacccaagcttaaagtactgggcaacgtaaaaaaactcaccttgaaagtcgggtcaaacgtcgatgggatgggcggtttccta

SEQ ID NO: 1776 - protein, 46 aa, Spirosoma spitsbergense
MKTKAVHIQISSPKKAYKTPKLKVLGNVKKLTLKVGSNVDGMGGFL

SEQ ID NO: 1777 - DNA, 144 bp, Spirosoma radiotolerans
  CDS (1)..(144)
atgactacaaagactgtacatatatcggctccggcgcccaaaaaagcctacaaaacgcccaagctaaaatcgctgggtagcgtcaaaaaactaactttgaagagtggatcggccaccgatggtttcggttcatttgcaacagcc

SEQ ID NO: 1778 - protein, 48 aa, Spirosoma radiotolerans
MTTKTVHISAPAPKKAYKTPKLKSLGSVKKLTLKSGSATDGFGSFATA

SEQ ID NO: 1779 - DNA, 117 bp, Streptomyces silvensis
  CDS (1)..(117)
atgaacgacgtctacgagccgcccgcgctggaagagatcggcggcttcgcggaactgacgatggccttcgggccgtgcgtcgagaacgactgggtgtggggcaccgcctggatctgc

SEQ ID NO: 1780 - protein, 39 aa, Streptomyces silvensis
MNDVYEPPALEEIGGFAELTMAFGPCVENDWVWGTAWIC

SEQ ID NO: 1781 - DNA, 126 bp, Paenibacillus polymyxa; identical to SEQ ID NO: 829
  CDS (1)..(126)

SEQ ID NO: 1782 - protein, 42 aa, Paenibacillus polymyxa; identical to SEQ ID NO: 830

SEQ ID NO: 1783 - DNA, 126 bp, Paenibacillus polymyxa; identical to SEQ ID NO: 829
  CDS (1)..(126)

SEQ ID NO: 1784 - protein, 42 aa, Paenibacillus polymyxa; identical to SEQ ID NO: 830

SEQ ID NO: 1785 - DNA, 126 bp, Paenibacillus sp.
  CDS (1)..(126)
atggcgaagcaagaatggcaagctcctgttctcgagacgctcgacgtcaaagaaacgatgtacggcaaaggcgtaacggaagtcgattcggtaaccatcaacgataaggatatttacgacccgagt

SEQ ID NO: 1786 - protein, 42 aa, Paenibacillus sp.
MAKQEWQAPVLETLDVKETMYGKGVTEVDSVTINDKDIYDPS

SEQ ID NO: 1787 - DNA, 144 bp, Spirosoma linguale
  CDS (1)..(144)
atgaaattaactaaaaaagatatatctgtttcggctccggcacgtaagagagcatacagcactccaaaactaaagtcactgggtaacgtgaaaaaactaacgctaaaaaccggttcgagcgttgatggcttcggctcttttggt

SEQ ID NO: 1788 - protein, 48 aa, Spirosoma linguale
MKLTKKDISVSAPARKRAYSTPKLKSLGNVKKLTLKTGSSVDGFGSFG

SEQ ID NO: 1789 - DNA, 108 bp, Brevundimonas nasdae
  CDS (1)..(108)
atgacctcgctgggttcgttcgaaaccctgacgcaaggcgcttcgcgcggctccgcgctcgacgccaccttcccgacgggcaccccgttcggcgatctgaccttctcc

SEQ ID NO: 1790 - protein, 36 aa, Brevundimonas nasdae
MTSLGSFETLTQGASRGSALDATFPTGTPFGDLTFS

SEQ ID NO: 1791 - DNA, 129 bp, Gorillibacterium sp.
  CDS (1)..(129)
atgaaaaaggaatggaaacaacccgaattggaaatcctcagcgttcaaatgacgatggccggtcctggcaaagccttcccggatagcttcattgaagacgaagacgaaaccgcccacctcaatcacagc

SEQ ID NO: 1792 - protein, 43 aa, Gorillibacterium sp.
MKKEWKQPELEILSVQMTMAGPGKAFPDSFIEDEDETAHLNHS

SEQ ID NO: 1793 - DNA, 126 bp, Leucobacter sp.
  CDS (1)..(126)
atgattaagtctcagtacatcgccccagtggtggaagaagtaggaacctttcatgaggccacgaacggtcagttcaacaagaggtacctcgacatcttcttcatgaccacgccttacacctggggc

SEQ ID NO: 1794 - protein, 42 aa, Leucobacter sp.
MIKSQYIAPVVEEVGTFHEATNGQFNKRYLDIFFMTTPYTWG

SEQ ID NO: 1795 - DNA, 108 bp, Streptomyces pactum; identical to SEQ ID NO: 645
  CDS (1)..(108)

SEQ ID NO: 1796 - protein, 36 aa, Streptomyces pactum; identical to SEQ ID NO: 646

SEQ ID NO: 1797 - DNA, 201 bp, Streptomyces prasinopilosus
  CDS (1)..(201)
atgactttcgactccctcgccgcatgtctgcgcgacgcggtcagacgcgaacggcgtcgcacgcgatccggcgcggcgccctcaccgagcgggccgccggcccacgcgtcccccctgctggtcgacctcgggcacgtccgcgaggtgacgctcggcagctcgcccagtggcagcgccgacgccaacgcccagtactactgg

SEQ ID NO: 1798 - protein, 67 aa, Streptomyces prasinopilosus
MTFDSLAACLRDAVRRERRRTRSGAAPSPSGPPAHASPLLVDLGHVREVTLGSSPSGSADANAQYYW

SEQ ID NO: 1799 - DNA, 132 bp, Streptomyces hirsutus
  CDS (1)..(132)
atggaccactccaccactcaggtcacccccgtctaccaggccccggtcgtgctggacgccggcgtcgtcgtcacggtgacgctgggcaccaacaacttcgacaccgccgacgacaccgagtacaagaacgcc

SEQ ID NO: 1800 - protein, 44 aa, Streptomyces hirsutus
MDHSTTQVTPVYQAPVVLDAGVVVTVTLGTNNFDTADDTEYKNA

SEQ ID NO: 1801 - DNA, 201 bp, Streptomyces prasinus
  CDS (1)..(201)
atgactttcgactccctcgccgcatatctgcgcgacgcggtcagacgtgaacgtcgtcgcacgcgatccggcgcggcgccctcaccgagcgggccgccggcccacgagtcccccctgctggtcgacctcgggcacgtccgcgaggtgacgctcggcagctcgcccagtggcagcgccgacgccaacgcccagtactactgg

SEQ ID NO: 1802 - protein, 67 aa, Streptomyces prasinus
MTFDSLAAYLRDAVRRERRRTRSGAAPSPSGPPAHESPLLVDLGHVREVTLGSSPSGSADANAQYYW

SEQ ID NO: 1803 - DNA, 201 bp, Streptomyces prasinus; identical to SEQ ID NO: 1801
  CDS (1)..(201)

SEQ ID NO: 1804 - protein, 67 aa, Streptomyces prasinus; identical to SEQ ID NO: 1802

SEQ ID NO: 1805 - DNA, 132 bp, Streptomyces kanamyceticus
  CDS (1)..(132)
atggaatcacaggttcacgaggtactccctgagccgtacgagccgccggcgctgattgaagtcggcgagttctcggaggacacgctgggcttcggcagcaggccgctggacagcttcggcctcaatatccgc

SEQ ID NO: 1806 - protein, 44 aa, Streptomyces kanamyceticus
MESQVHEVLPEPYEPPALIEVGEFSEDTLGFGSRPLDSFGLNIR

SEQ ID NO: 1807 - DNA, 108 bp, Microbacterium testaceum
  CDS (1)..(108)
atggacgacatctacgaggcgccttgtgcagtgctcgtcgccgacttccgccgcgacacggcgttgaccagtcgcggcggctggcccgacctcttgggctggtggttc

SEQ ID NO: 1808 - protein, 36 aa, Microbacterium testaceum
MDDIYEAPCAVLVADFRRDTALTSRGGWPDLLGWWF

SEQ ID NO: 1809 - DNA, 108 bp, Microbacterium testaceum
  CDS (1)..(108)
atgaccgaaacctacgagaagcctcaggtgctcgtcgtgggcgacttccgcaaggacaccgccttcacgtcccagggctactggaccgacgtcctcggctggtggctc

SEQ ID NO: 1810 - protein, 36 aa, Microbacterium testaceum
MTETYEKPQVLVVGDFRKDTAFTSQGYWTDVLGWWL

SEQ ID NO: 1811 - DNA, 108 bp, Microbacterium testaceum; identical to SEQ ID NO: 1807
  CDS (1)..(108)

SEQ ID NO: 1812 - protein, 36 aa, Microbacterium testaceum; identical to SEQ ID NO: 1808

SEQ ID NO: 1813 - DNA, 108 bp, Microbacterium testaceum; identical to SEQ ID NO: 1809
  CDS (1)..(108)

SEQ ID NO: 1814 - protein, 36 aa, Microbacterium testaceum; identical to SEQ ID NO: 1810

SEQ ID NO: 1815 - DNA, 108 bp, Microbacterium testaceum; identical to SEQ ID NO: 1809
  CDS (1)..(108)

SEQ ID NO: 1816 - protein, 36 aa, Microbacterium testaceum; identical to SEQ ID NO: 1810

SEQ ID NO: 1817 - DNA, 108 bp, Microbacterium testaceum; identical to SEQ ID NO: 1807
  CDS (1)..(108)

SEQ ID NO: 1818 - protein, 36 aa, Microbacterium testaceum; identical to SEQ ID NO: 1808

SEQ ID NO: 1819 - DNA, 138 bp, Nonomuraea coxensis
  CDS (1)..(138)
atgtacgacgagaccacctcccaccccgaccacgctcagccctacgccacgcccaccctggtcgacctcggcagcgtccgcgccatcaccctgggcagcgcccgccacgacaccgccgacaagaagaagtactacaac

SEQ ID NO: 1820 - protein, 46 aa, Nonomuraea coxensis
MYDETTSHPDHAQPYATPTLVDLGSVRAITLGSARHDTADKKKYYN

SEQ ID NO: 1821 - DNA, 141 bp, Luteimonas abyssi
  CDS (1)..(141)
atgaacgcgaacgagaacatccgcaacgaagtgcaggacggcgacgtcgtcgagctcggcgtggccagcgtcgagaccagggggatgctgccggaaggagacgaggagttcggccgcatcgtcggtgtcggcatcaccgag

SEQ ID NO: 1822 - protein, 47 aa, Luteimonas abyssi
MNANENIRNEVQDGDVVELGVASVETRGMLPEGDEEFGRIVGVGITE

SEQ ID NO: 1823 - DNA, 117 bp, Sphingomonas sp.
  CDS (1)..(117)
atggatacgaaaaagcccacgctgctcgtctatctcggcaaggtctcgaaggagaccaaggccccggcgatgttcggttcgcccgagatcggcaatctcatctacgcctaccgcgtt

SEQ ID NO: 1824 - protein, 39 aa, Sphingomonas sp.
MDTKKPTLLVYLGKVSKETKAPAMFGSPEIGNLIYAYRV

SEQ ID NO: 1825 - DNA, 138 bp, Xanthomonas sp.; identical to SEQ ID NO: 387
  CDS (1)..(138)

SEQ ID NO: 1826 - protein, 46 aa, Xanthomonas sp.; identical to SEQ ID NO: 388

SEQ ID NO: 1827 - DNA, 147 bp, Xanthomonas sp.; identical to SEQ ID NO: 389
  CDS (1)..(147)

SEQ ID NO: 1828 - protein, 49 aa, Xanthomonas sp.; identical to SEQ ID NO: 390

SEQ ID NO: 1829 - DNA, 156 bp, Frankia inefficax
  CDS (1)..(156)
atgatcgccgagaagaccggcaccgccgagggccatatcgccgcgcggcgtgcctaccagaagcccagcctgaccgagcatggcagcctcgcggtgcggacggccggccagcccggcctgctgctggacgccatcatccagatcgcgcagccgagc

SEQ ID NO: 1830 - protein, 52 aa, Frankia inefficax
MIAEKTGTAEGHIAARRAYQKPSLTEHGSLAVRTAGQPGLLLDAIIQIAQPS

SEQ ID NO: 1831 - DNA, 129 bp, Bacillus vietnamensis
  CDS (1)..(129)
atgaagaaaatttgggaagaaccaaagctgaaagtacttaacgtcaatttgacaatggctggtccaggaattagagatgtagatgaatcttatgaggatgaagatgagcaaggattccttcatcatagc

SEQ ID NO: 1832 - protein, 43 aa, Bacillus vietnamensis
MKKIWEEPKLKVLNVNLTMAGPGIRDVDESYEDEDEQGFLHHS

SEQ ID NO: 1833 - DNA, 129 bp, Bacillus sp.
  CDS (1)..(129)
atgaaacaagaatggcaatcaccagtattagaagtgcttgatatcaacatgacaatggctggacctggaaaacgaattgttgaccaagtgtttgaagatgaggatgagcaaggcacacttagccacagc

SEQ ID NO: 1834 - protein, 43 aa, Bacillus sp.
MKQEWQSPVLEVLDINMTMAGPGKRIVDQVFEDEDEQGTLSHS

SEQ ID NO: 1835 - DNA, 99 bp, Bacillus aryabhattai
  CDS (1)..(99)
atggcttctacagtctatggtccttatacggatgaagcatatgtaccaggtaaagatgttgataaagataaccctggtacatggaaacgttttacgagt

SEQ ID NO: 1836 - protein, 33 aa, Bacillus aryabhattai
MASTVYGPYTDEAYVPGKDVDKDNPGTWKRFTS

SEQ ID NO: 1837 - DNA, 123 bp, Bacillus sp.
  CDS (1)..(123)
atgaaaaaagaatggcaaactccaaaattagaagtacttaacatcaacatgactatgggaggtcccggtataatgatccctgatggtgtgcagaatgatccagatgaaatggttcaccatagt

SEQ ID NO: 1838 - protein, 41 aa, Bacillus sp.
MKKEWQTPKLEVLNINMTMGGPGIMIPDGVQNDPDEMVHHS

SEQ ID NO: 1839 - DNA, 129 bp, Bacillus pseudomycoides
  CDS (1)..(129)
atgaaacaagaatggcaatcaccagtattagaagtgcttgatatcaacatgacaatggctggacctggaaagagacttgttgaccaagtttttgaagatgaggatgagcaaggcgcacttcaccacaac

SEQ ID NO: 1840 - protein, 43 aa, Bacillus pseudomycoides
MKQEWQSPVLEVLDINMTMAGPGKRLVDQVFEDEDEQGALHHN

SEQ ID NO: 1841 - DNA, 132 bp, Bacillus kribbensis
  CDS (1)..(132)
atgaaaaagcagtgggaaaagcctgttctggaagtacttgatgtgaaaatgactatgggacacacagcacagatggaccatcttgacgctaaatatgaagctggtacaccgtatgcgaagttgacttggagt

SEQ ID NO: 1842 - protein, 44 aa, Bacillus kribbensis
MKKQWEKPVLEVLDVKMTMGHTAQMDHLDAKYEAGTPYAKLTWS

SEQ ID NO: 1843 - DNA, 129 bp, Bacillus mycoides
  CDS (1)..(129)
atgaaacaagaatggcaatcaccagtattagaagtgcttgatatcaacatgacaatggctggacctggaaagagacttgttgaccaagtttttgaagatgaggatgagcaaggcgcacttcaccacagc

SEQ ID NO: 1844 - protein, 43 aa, Bacillus mycoides
MKQEWQSPVLEVLDINMTMAGPGKRLVDQVFEDEDEQGALHHS

SEQ ID NO: 1845 - DNA, 129 bp, Bacillus cereus
  CDS (1)..(129)
atgaaaaaagagtggaaaactccggtgctagagacactggatattaatatgactatggcatcaggatacgagggctatcatgatgaagcttacaatggtgaacctgcaaatggtccgcatcatcagtca

SEQ ID NO: 1846 - protein, 43 aa, Bacillus cereus
MKKEWKTPVLETLDINMTMASGYEGYHDEAYNGEPANGPHHQS

SEQ ID NO: 1847 - DNA, 129 bp, Bacillus mycoides; identical to SEQ ID NO: 1843
  CDS (1)..(129)

SEQ ID NO: 1848 - protein, 43 aa, Bacillus mycoides; identical to SEQ ID NO: 1844

SEQ ID NO: 1849 - DNA, 129 bp, Bacillus mycoides; identical to SEQ ID NO: 1843
  CDS (1)..(129)

SEQ ID NO: 1850 - protein, 43 aa, Bacillus mycoides; identical to SEQ ID NO: 1844

SEQ ID NO: 1851 - DNA, 129 bp, Bacillus mycoides; identical to SEQ ID NO: 1843
  CDS (1)..(129)

SEQ ID NO: 1852 - protein, 43 aa, Bacillus mycoides; identical to SEQ ID NO: 1844

SEQ ID NO: 1853 - DNA, 129 bp, Bacillus mycoides; identical to SEQ ID NO: 1843
  CDS (1)..(129)

SEQ ID NO: 1854 - protein, 43 aa, Bacillus mycoides; identical to SEQ ID NO: 1844

SEQ ID NO: 1855 - DNA, 129 bp, Bacillus mycoides; identical to SEQ ID NO: 1843
  CDS (1)..(129)

SEQ ID NO: 1856 - protein, 43 aa, Bacillus mycoides; identical to SEQ ID NO: 1844

SEQ ID NO: 1857 - DNA, 123 bp, Bacillus sp.
  CDS (1)..(123)
atgaaaaaagaatggaagaaaccagtactagaagtgcttgatattaatatgacaatggctggaccaggacataaaattccggatgcagttcagcccgatccagatgatcctgtaaagtacagc

SEQ ID NO: 1858 - protein, 41 aa, Bacillus sp.
MKKEWKKPVLEVLDINMTMAGPGHKIPDAVQPDPDDPVKYS

SEQ ID NO: 1859 - DNA, 123 bp, Bacillus cereus
  CDS (1)..(123)
atgaaaaaagattggacaattcctacattggaagtacttgatattaatatgacaatggctggaccaggtattaaaacacctgatgctgttcaaccagatgttgatgaagtagttcactatagt

SEQ ID NO: 1860 - protein, 41 aa, Bacillus cereus
MKKDWTIPTLEVLDINMTMAGPGIKTPDAVQPDVDEVVHYS

SEQ ID NO: 1861 - DNA, 129 bp, Bacillus mycoides; identical to SEQ ID NO: 1843
  CDS (1)..(129)

SEQ ID NO: 1862 - protein, 43 aa, Bacillus mycoides; identical to SEQ ID NO: 1844

SEQ ID NO: 1863 - DNA, 129 bp, Bacillus mycoides; identical to SEQ ID NO: 1843
  CDS (1)..(129)

SEQ ID NO: 1864 - protein, 43 aa, Bacillus mycoides; identical to SEQ ID NO: 1844

SEQ ID NO: 1865 - DNA, 129 bp, Bacillus mycoides; identical to SEQ ID NO: 1843
  CDS (1)..(129)

SEQ ID NO: 1866 - protein, 43 aa, Bacillus mycoides; identical to SEQ ID NO: 1844

SEQ ID NO: 1867 - DNA, 123 bp, Bacillus simplex
  CDS (1)..(123)
atgaaaaaagaatggcaaactccaaaattagaagtacttaacattaacatgactatggggggtcccggtataatgatccctgatgctatgcagaatgatccggatgaaatggttcaccatagt

SEQ ID NO: 1868 - protein, 41 aa, Bacillus simplex
MKKEWQTPKLEVLNINMTMGGPGIMIPDAMQNDPDEMVHHS

SEQ ID NO: 1869 - DNA, 129 bp, Bacillus cereus
  CDS (1)..(129)
atgaaacaagaatggcaatcaccagtattagaagtgcttgatatcaacatgacaatggctggaccaggaaagagacttgttgaccaagtttttgaagatgaggatgagtcaggcgctcttcaccacagc

SEQ ID NO: 1870 - protein, 43 aa, Bacillus cereus
MKQEWQSPVLEVLDINMTMAGPGKRLVDQVFEDEDESGALHHS

SEQ ID NO: 1871 - DNA, 129 bp, Bacillus mycoides; identical to SEQ ID NO: 1843
  CDS (1)..(129)

SEQ ID NO: 1872 - protein, 43 aa, Bacillus mycoides; identical to SEQ ID NO: 1844

SEQ ID NO: 1873 - DNA, 99 bp, Bacillus sp.
  CDS (1)..(99)
atggcttcaacagtttatggtccatatactgatgaagcatacaaccctggtcaccctgttgatccaaaaaatcctgatacttggaaccgttttactagc

SEQ ID NO: 1874 - protein, 33 aa, Bacillus sp.
MASTVYGPYTDEAYNPGHPVDPKNPDTWNRFTS

SEQ ID NO: 1875 - DNA, 132 bp, Bacillus sp.
  CDS (1)..(132)
atgaaaaaggaatgggaaaagccagtattagaagtactagatattaatatgacaatgttaggttccaaaaacggaggcgttgatttttatgttaaagatccgtttgatggcgaagaagcagtattgcatagt

SEQ ID NO: 1876 - protein, 44 aa, Bacillus sp.
MKKEWEKPVLEVLDINMTMLGSKNGGVDFYVKDPFDGEEAVLHS

SEQ ID NO: 1877 - DNA, 111 bp, Jeotgalibacillus soli
  CDS (1)..(111)
atgccaacacttgaagtgcttgaagtgaagatgaccatgcttggacgtgaaggagaatttacagatgctgatttcgatgctcatacaccatttttagaattaacttttagc

SEQ ID NO: 1878 - protein, 37 aa, Jeotgalibacillus soli
MPTLEVLEVKMTMLGREGEFTDADFDAHTPFLELTFS

SEQ ID NO: 1879 - DNA, 129 bp, Bacillus mycoides; identical to SEQ ID NO: 1843
  CDS (1)..(129)

SEQ ID NO: 1880 - protein, 43 aa, Bacillus mycoides; identical to SEQ ID NO: 1844

SEQ ID NO: 1881 - DNA, 123 bp, Bacillus sp.
  CDS (1)..(123)
atgaaaaaagattggaccattcctacactggaagtacttgatattaatatgacaatggctggaccgggacttaaaacaccggatgctgttcaaccagatattgatgaagtagtgcactatagt

SEQ ID NO: 1882 - protein, 41 aa, Bacillus sp.
MKKDWTIPTLEVLDINMTMAGPGLKTPDAVQPDIDEVVHYS

SEQ ID NO: 1883 - DNA, 132 bp, Bacillus sp.
  CDS (1)..(132)
atgaaaaaggaatgggaaaaacctgaattagagattcttgatgttaataagacaatgcttggtacggatggtgagtacacagatgctgcttttccttctcacacgcctaaaggagatctaacgtttggaagc

SEQ ID NO: 1884 - protein, 44 aa, Bacillus sp.
MKKEWEKPELEILDVNKTMLGTDGEYTDAAFPSHTPKGDLTFGS

SEQ ID NO: 1885 - DNA, 132 bp, Bacillus sp.
  CDS (1)..(132)
atgaaaaaggaatggaaaaaacctgaattagagattcttgatgttaataagacaatgcttggtacggatggtgagtacacagatgctgctttcccttctcacactcctaaaggagatataacttttggtagt

SEQ ID NO: 1886 - protein, 44 aa, Bacillus sp.
MKKEWKKPELEILDVNKTMLGTDGEYTDAAFPSHTPKGDITFGS

SEQ ID NO: 1887 - DNA, 123 bp, Bacillus cereus
  CDS (1)..(123)
atgaaaaaagattggacaattcctacattggaagtacttgatatcaatatgacaatggctggaccgggtattaaaatacctgatggtgttcaaccggatgaggacgaaatggttcaccatagc

SEQ ID NO: 1888 - protein, 41 aa, Bacillus cereus
MKKDWTIPTLEVLDINMTMAGPGIKIPDGVQPDEDEMVHHS

SEQ ID NO: 1889 - DNA, 123 bp, Bacillus sp.; identical to SEQ ID NO: 1881
  CDS (1)..(123)

SEQ ID NO: 1890 - protein, 41 aa, Bacillus sp.; identical to SEQ ID NO: 1882

SEQ ID NO: 1891 - DNA, 123 bp, Bacillus sp.; identical to SEQ ID NO: 1881
  CDS (1)..(123)

SEQ ID NO: 1892 - protein, 41 aa, Bacillus sp.; identical to SEQ ID NO: 1882

SEQ ID NO: 1893 - DNA, 123 bp, Bacillus sp.
  CDS (1)..(123)
atgaaaaaggtatgggtaaaaccagaattagaagtacttaatgtaaatatgactatggcgggaccaggaattaagacacctgatgcagtacaaccagatgttgatgaagtgattcattatagt

SEQ ID NO: 1894 - protein, 41 aa, Bacillus sp.
MKKVWVKPELEVLNVNMTMAGPGIKTPDAVQPDVDEVIHYS

SEQ ID NO: 1895 - DNA, 123 bp, Bacillus cereus; identical to SEQ ID NO: 1887
  CDS (1)..(123)

SEQ ID NO: 1896 - protein, 41 aa, Bacillus cereus; identical to SEQ ID NO: 1888

SEQ ID NO: 1897 - DNA, 105 bp, Bacillus weihenstephanensis
  CDS (1)..(105)
atgcctacactggaagtgcttgatatcaatatgacaatggctggaccgggtattaaaatacctgatgctgcccaaccagatgttgatgaaacgattcaccatagc

SEQ ID NO: 1898 - protein, 35 aa, Bacillus weihenstephanensis
MPTLEVLDINMTMAGPGIKIPDAAQPDVDETIHHS

SEQ ID NO: 1899 - DNA, 123 bp, Bacillus cereus; identical to SEQ ID NO: 1887
  CDS (1)..(123)

SEQ ID NO: 1900 - protein, 41 aa, Bacillus cereus; identical to SEQ ID NO: 1888

SEQ ID NO: 1901 - DNA, 129 bp, Bacillus cereus
  CDS (1)..(129)
atgaaaaaagaatgggagaaacctattttagaggtgttggatgtgaagatgacaatgttggggaaagaaggagagtatactgatgctgcttttcctgaacatactccaaagggtgatataacttttagt

SEQ ID NO: 1902 - protein, 43 aa, Bacillus cereus
MKKEWEKPILEVLDVKMTMLGKEGEYTDAAFPEHTPKGDITFS

SEQ ID NO: 1903 - DNA, 123 bp, Bacillus thuringiensis
  CDS (1)..(123)
atgaaaaaggaatggaaacaacctgtattagaagtacttaatgttaatatgactatggcgggaccaggacataaaattcctgacgcagttcaacctgatccagatgatccagtgaagtatagt

SEQ ID NO: 1904 - protein, 41 aa, Bacillus thuringiensis
MKKEWKQPVLEVLNVNMTMAGPGHKIPDAVQPDPDDPVKYS

SEQ ID NO: 1905 - DNA, 129 bp, Bacillus cereus
  CDS (1)..(129)
atgaaaaaagaatgggagaaacctattttagaggtgttggatgtgaagatgacaatgttggggaaagaaggagagtatactgatgccgcttttccggaccatactcctaagggtgatctaacttttagt

SEQ ID NO: 1906 - protein, 43 aa, Bacillus cereus
MKKEWEKPILEVLDVKMTMLGKEGEYTDAAFPDHTPKGDLTFS

SEQ ID NO: 1907 - DNA, 81 bp, Halobacillus sp.
  CDS (1)..(81)
atgacaatggctgccggttacgaaggttaccatgatgaagcttataatggagagcctgcttatggtccacaccacgagtca

SEQ ID NO: 1908 - protein, 27 aa, Halobacillus sp.
MTMAAGYEGYHDEAYNGEPAYGPHHES

SEQ ID NO: 1909 - DNA, 111 bp, Paenibacillus sp.
  CDS (1)..(111)
atgttgcaagtccttgatgtcagcgagaccatgggtggaaaaaatggagtgtatcctgacagaaatggtaaaggtaacaataatggtcagcctcatgaggacatggactct

SEQ ID NO: 1910 - protein, 37 aa, Paenibacillus sp.
MLQVLDVSETMGGKNGVYPDRNGKGNNNGQPHEDMDS

SEQ ID NO: 1911 - DNA, 135 bp, Paenibacillus sp.
  CDS (1)..(135)
atgcaaaatcaagctaaaaaagaatggaatatcccgactttggaagtacttgatgtgaaaatgacaatggctggaccaggaattgcacatccggatggcgttcaacccgacccgactgaggtcgttcactacagc

SEQ ID NO: 1912 - protein, 45 aa, Paenibacillus sp.
MQNQAKKEWNIPTLEVLDVKMTMAGPGIAHPDGVQPDPTEVVHYS

SEQ ID NO: 1913 - DNA, 123 bp, Bacillus cereus
  CDS (1)..(123)
atgaaaaaagattggacaattcctacactggaagtacttgatattaatatgacgatggctggaccgggacttaaaacaccggatgctgttcaaccagatgttgatgaagtagtgcactatagt

SEQ ID NO: 1914 - protein, 41 aa, Bacillus cereus
MKKDWTIPTLEVLDINMTMAGPGLKTPDAVQPDVDEVVHYS

SEQ ID NO: 1915 - DNA, 123 bp, Bacillus cereus
  CDS (1)..(123)
atgaaaaaggaatggaaacaacctgtattagaagtacttaatattaatatgactatggcggggccaggacataaatatcctgactcgattcaacctgatccagatgatccggtgaagtatagt

SEQ ID NO: 1916 - protein, 41 aa, Bacillus cereus
MKKEWKQPVLEVLNINMTMAGPGHKYPDSIQPDPDDPVKYS

SEQ ID NO: 1917 - DNA, 135 bp, Paenibacillus sp.; identical to SEQ ID NO: 1911
  CDS (1)..(135)

SEQ ID NO: 1918 - protein, 45 aa, Paenibacillus sp.; identical to SEQ ID NO: 1912

SEQ ID NO: 1919 - DNA, 99 bp, Paenibacillus sp.
  CDS (1)..(99)
atggcatcgacagtttacggtgatttcactgacgaagcttatgtacctggtaaaccggttgatcctaacaacccaagcacctggaaacgtttcaacagc

SEQ ID NO: 1920 - protein, 33 aa, Paenibacillus sp.
MASTVYGDFTDEAYVPGKPVDPNNPSTWKRFNS

SEQ ID NO: 1921 - DNA, 123 bp, Bacillus weihenstephanensis
  CDS (1)..(123)
atgaaaaaggaatggaaacaacctgtattagaagtacttaatattaatatgactatggcggggcctgggcataaatatccagatgctgttcaacctgacccagatgatccagtgaagtacagt

SEQ ID NO: 1922 - protein, 41 aa, Bacillus weihenstephanensis
MKKEWKQPVLEVLNINMTMAGPGHKYPDAVQPDPDDPVKYS

SEQ ID NO: 1923 - DNA, 123 bp, Bacillus weihenstephanensis; identical to SEQ ID NO: 1921
  CDS (1)..(123)

SEQ ID NO: 1924 - protein, 41 aa, Bacillus weihenstephanensis; identical to SEQ ID NO: 1922

SEQ ID NO: 1925 - DNA, 123 bp, Bacillus weihenstephanensis; identical to SEQ ID NO: 1921
  CDS (1)..(123)

SEQ ID NO: 1926 - protein, 41 aa, Bacillus weihenstephanensis; identical to SEQ ID NO: 1922

SEQ ID NO: 1927 - DNA, 123 bp, Bacillus weihenstephanensis; identical to SEQ ID NO: 1921
  CDS (1)..(123)

SEQ ID NO: 1928 - protein, 41 aa, Bacillus weihenstephanensis; identical to SEQ ID NO: 1922

SEQ ID NO: 1929 - DNA, 141 bp, Paenibacillus sp.
  CDS (1)..(141)
atgcaaacgaaaaaacaatggaataaacctgagctagaggtccttcatgtacatatgactgcggcttccacgaaaaacggtccgttcacagatgaggcttacgtacctggccaacattctgaaaagccacgttttactagc

SEQ ID NO: 1930 - protein, 47 aa, Paenibacillus sp.
MQTKKQWNKPELEVLHVHMTAASTKNGPFTDEAYVPGQHSEKPRFTS

SEQ ID NO: 1931 - DNA, 141 bp, Bacillus sp.
  CDS (1)..(141)
atgcaagtgaaaaaacaatggaacaaacctgaactagaagtccttcatgtacatatgaccgcggcttccactaaaaccggtccttatactgatgaggcatacgtgccgggtgaatattccgaagatcctcgtttcactagc

SEQ ID NO: 1932 - protein, 47 aa, Bacillus sp.
MQVKKQWNKPELEVLHVHMTAASTKTGPYTDEAYVPGEYSEDPRFTS

SEQ ID NO: 1933 - DNA, 123 bp, Paenibacillus sp.
  CDS (1)..(123)
atgaaaaaagagtggaacgtacctgcattggaagtacttagtataaacatgacgatggctggtcctggtgattcaagaccggatggggtacaaccggaccctgatgaaagtgtacactacagc

SEQ ID NO: 1934 - protein, 41 aa, Paenibacillus sp.
MKKEWNVPALEVLSINMTMAGPGDSRPDGVQPDPDESVHYS

SEQ ID NO: 1935 - DNA, 123 bp, Bacillus cereus
  CDS (1)..(123)
atgaaaaaggaatggaaacaacctgtattagaagtacttaatattaatatgactatggcggggccaggacataaaattcctgacgcagttcaacctgatccagatgatccagtgaagtatagt

SEQ ID NO: 1936 - protein, 41 aa, Bacillus cereus
MKKEWKQPVLEVLNINMTMAGPGHKIPDAVQPDPDDPVKYS

SEQ ID NO: 1937 - DNA, 123 bp, Bacillus cereus
  CDS (1)..(123)
atgaaaaaggaatggaaacaacctgtattagaagtacttaatattaatatgactatggcgggacctggacataaatatcctgatgctgctcaacctgatccagatgatccagtgaagtatagt

SEQ ID NO: 1938 - protein, 41 aa, Bacillus cereus
MKKEWKQPVLEVLNINMTMAGPGHKYPDAAQPDPDDPVKYS

SEQ ID NO: 1939 - DNA, 123 bp, Bacillus weihenstephanensis; identical to SEQ ID NO: 1921
  CDS (1)..(123)

SEQ ID NO: 1940 - protein, 41 aa, Bacillus weihenstephanensis; identical to SEQ ID NO: 1922

SEQ ID NO: 1941 - DNA, 123 bp, Bacillus cereus
  CDS (1)..(123)
atgaaaaaggaatggaaacaacctgtattggaagtacttaatattaatatgactatggcgggacctgggcataaacttcctgatgctgttcaacctgatccagatgatgcggtgaagtatagt

SEQ ID NO: 1942 - protein, 41 aa, Bacillus cereus
MKKEWKQPVLEVLNINMTMAGPGHKLPDAVQPDPDDAVKYS

SEQ ID NO: 1943 - DNA, 123 bp, Bacillus weihenstephanensis; identical to SEQ ID NO: 1921
  CDS (1)..(123)

SEQ ID NO: 1944 - protein, 41 aa, Bacillus weihenstephanensis; identical to SEQ ID NO: 1922

SEQ ID NO: 1945 - DNA, 129 bp, Paenisporosarcina sp.
  CDS (1)..(129)
atgaaaaaacaatggaagaaacccaaactggaagttcttgatgtaagtatgacaatgcttggtactgatggtgagtacacagatgcagcttttaatagtgacactcctaaaggggatgtaactttcagt

SEQ ID NO: 1946 - protein, 43 aa, Paenisporosarcina sp.
MKKQWKKPKLEVLDVSMTMLGTDGEYTDAAFNSDTPKGDVTFS

SEQ ID NO: 1947 - DNA, 126 bp, Paenisporosarcina sp.
  CDS (1)..(126)
atgaaaaaacaatggaagaaacctgaactagaagttcttgaagtaaatatgacaatgggtggtgataatggtgagtacccagatgcagctagtaaaggaggtttcaataatagaaaaacagaaagc

SEQ ID NO: 1948 - protein, 42 aa, Paenisporosarcina sp.
MKKQWKKPELEVLEVNMTMGGDNGEYPDAASKGGFNNRKTES

SEQ ID NO: 1949 - DNA, 123 bp, Bacillus weihenstephanensis; identical to SEQ ID NO: 1921
  CDS (1)..(123)

SEQ ID NO: 1950 - protein, 41 aa, Bacillus weihenstephanensis; identical to SEQ ID NO: 1922

SEQ ID NO: 1951 - DNA, 123 bp, Bacillus cereus
  CDS (1)..(123)
atgaaaaaggaatggaaacaacctatattagaagtacttaatattaatatgactatggcggggccaggacgtagaattcctgacgcagttcaacctgatccagatgatccagtgaagtatagt

SEQ ID NO: 1952 - protein, 41 aa, Bacillus cereus
MKKEWKQPILEVLNINMTMAGPGRRIPDAVQPDPDDPVKYS

SEQ ID NO: 1953 - DNA, 123 bp, Bacillus cereus; identical to SEQ ID NO: 1941
  CDS (1)..(123)

SEQ ID NO: 1954 - protein, 41 aa, Bacillus cereus; identical to SEQ ID NO: 1942

SEQ ID NO: 1955 - DNA, 123 bp, Bacillus weihenstephanensis; identical to SEQ ID NO: 1921
  CDS (1)..(123)

SEQ ID NO: 1956 - protein, 41 aa, Bacillus weihenstephanensis; identical to SEQ ID NO: 1922

SEQ ID NO: 1957 - DNA, 123 bp, Bacillus weihenstephanensis; identical to SEQ ID NO: 1921
  CDS (1)..(123)

SEQ ID NO: 1958 - protein, 41 aa, Bacillus weihenstephanensis; identical to SEQ ID NO: 1922

SEQ ID NO: 1959 - DNA, 123 bp, Bacillus cereus
  CDS (1)..(123)
atgaaaaaggaatggaaacaacctgtattagaagtgcttaatattaatatgactatggcggggccaggacatagaattcctgacgcagttcaacctgatccagatgatccggtgaagtatagt

SEQ ID NO: 1960 - protein, 41 aa, Bacillus cereus
MKKEWKQPVLEVLNINMTMAGPGHRIPDAVQPDPDDPVKYS

SEQ ID NO: 1961 - DNA, 123 bp, Paenibacillus sp.
  CDS (1)..(123)
atgcaaaaacaatggcaaaaaccggagttggaagcccttgatcttagtatgacgatggctggagagccagacgagcgtgttgacctatcttttttcggtattcctcttgcacttgggcctagc

SEQ ID NO: 1962 - protein, 41 aa, Paenibacillus sp.
MQKQWQKPELEALDLSMTMAGEPDERVDLSFFGIPLALGPS

SEQ ID NO: 1963 - DNA, 126 bp, Paenibacillus sp.
  CDS (1)..(126)
atgcaaaaacagtggaataaacctgaattacaaacacttgatctaagtatgacattggctggtccaacctctgattatatcgatgctacttactctgatcaaaatgaaactgttcatcttcatagc

SEQ ID NO: 1964 - protein, 42 aa, Paenibacillus sp.
MQKQWNKPELQTLDLSMTLAGPTSDYIDATYSDQNETVHLHS

SEQ ID NO: 1965 - DNA, 123 bp, Bacillus cereus; identical to SEQ ID NO: 1941
  CDS (1)..(123)

SEQ ID NO: 1966 - protein, 41 aa, Bacillus cereus; identical to SEQ ID NO: 1942

SEQ ID NO: 1967 - DNA, 123 bp, Bacillus weihenstephanensis; identical to SEQ ID NO: 1921
  CDS (1)..(123)

SEQ ID NO: 1968 - protein, 41 aa, Bacillus weihenstephanensis; identical to SEQ ID NO: 1922

SEQ ID NO: 1969 - DNA, 126 bp, Paenibacillus sp.
  CDS (1)..(126)
atgaacaaaacatgggaaaaaccagaattagaagtacttgatgtgaaaatgactatgacaggatttccggatcaacagcgggacttcttggacactaataacacagaacaccttatgggaccaagc

SEQ ID NO: 1970 - protein, 42 aa, Paenibacillus sp.
MNKTWEKPELEVLDVKMTMTGFPDQQRDFLDTNNTEHLMGPS

SEQ ID NO: 1971 - DNA, 132 bp, Paenibacillus alginolyticus
  CDS (1)..(132)
atgaaaaaagaatggttgaaacctgagcttgaagtattggatgttaatcaaacaatgcttgatccgaaaaatggtaaccaccttgatcatgcttatacggaaggtactcctaaagacaaattaacatggagc

SEQ ID NO: 1972 - protein, 44 aa, Paenibacillus alginolyticus
MKKEWLKPELEVLDVNQTMLDPKNGNHLDHAYTEGTPKDKLTWS

SEQ ID NO: 1973 - DNA, 123 bp, Bacillus cereus
  CDS (1)..(123)
atgaaaaaggaatggaaacaacctgtattggaagtacttagtattaatatgactatggcgggacctgggcataaacttcctgatgctgttcaacctgatccagatgatgcggtgaagtatagt

SEQ ID NO: 1974 - protein, 41 aa, Bacillus cereus
MKKEWKQPVLEVLSINMTMAGPGHKLPDAVQPDPDDAVKYS

SEQ ID NO: 1975 - DNA, 123 bp, Bacillus oceanisediminis
  CDS (1)..(123)
atgaaaaagcaatggcagaaacctgagttagaggtacttaatattaatatgactatggcaggacctggaattaaaacacctgatgctgtacagccagatcaagatgaaacggtacattatagt

SEQ ID NO: 1976 - protein, 41 aa, Bacillus oceanisediminis
MKKQWQKPELEVLNINMTMAGPGIKTPDAVQPDQDETVHYS

SEQ ID NO: 1977 - DNA, 123 bp, Bacillus flexus
  CDS (1)..(123)
atgaaaagagaatgggagaaaccggtattagaagtacttgatgtgaacatgacaatggctggacctggattaagcacacctgacgcggtacagcctgaccctgatgaaacaattcattatagt

SEQ ID NO: 1978 - protein, 41 aa, Bacillus flexus
MKREWEKPVLEVLDVNMTMAGPGLSTPDAVQPDPDETIHYS

SEQ ID NO: 1979 - DNA, 123 bp, Bacillus weihenstephanensis; identical to SEQ ID NO: 1921
  CDS (1)..(123)

SEQ ID NO: 1980 - protein, 41 aa, Bacillus weihenstephanensis; identical to SEQ ID NO: 1922

SEQ ID NO: 1981 - DNA, 126 bp, Bacillus sp.
  CDS (1)..(126)
atgaaaaagacatggaaaacaccagaattagaaattcttgatgttaatatgacaatggcaggtccaggatctacaattccagacgcagtacaacctgatccaaatgaaacaattcactatgaaagc

SEQ ID NO: 1982 - protein, 42 aa, Bacillus sp.
MKKTWKTPELEILDVNMTMAGPGSTIPDAVQPDPNETIHYES

SEQ ID NO: 1983 - DNA, 135 bp, Bacillus sp.
  CDS (1)..(135)
atgaaaaagcaatggaaacaaccagttctagaggtgttagatgtcagtatgacaatggcaggaccaggaattagaattcctgatgcagttcaaccagatccagatgctccacttaatgatgtggtgcattatagt

SEQ ID NO: 1984 - protein, 45 aa, Bacillus sp.
MKKQWKQPVLEVLDVSMTMAGPGIRIPDAVQPDPDAPLNDVVHYS

SEQ ID NO: 1985 - DNA, 123 bp, Bacillus flexus
  CDS (1)..(123)
atgaaaagagaatgggaaaagcctgtactagaagtacttgatgtaaatatgactatggctggacctggacacagattgcctgatgcagtgcaaccggatccagacgatgcagttaagtatagt

SEQ ID NO: 1986 - protein, 41 aa, Bacillus flexus
MKREWEKPVLEVLDVNMTMAGPGHRLPDAVQPDPDDAVKYS

SEQ ID NO: 1987 - DNA, 132 bp, Aneurinibacillus migulanus
  CDS (1)..(132)
atgaaaaaggaatggaaaaaacctagtttagaagtgctctctgtaaaggagacgatgcttggaagctcagggaaatacaccgacgctgcctttggttctcatactcctatagacgatatcactttcgaaagc

SEQ ID NO: 1988 - protein, 44 aa, Aneurinibacillus migulanus
MKKEWKKPSLEVLSVKETMLGSSGKYTDAAFGSHTPIDDITFES

SEQ ID NO: 1989 - DNA, 132 bp, Aneurinibacillus migulanus
  CDS (1)..(132)
atgaaaaaggagtggaaaaaacctagtttagaagtgctctctgtaagagagacgatgcttggaagctcagggaaatataccgacgctgcctttggttcccatactcctatagacgatatcactttcgaaagc

SEQ ID NO: 1990 - protein, 44 aa, Aneurinibacillus migulanus
MKKEWKKPSLEVLSVRETMLGSSGKYTDAAFGSHTPIDDITFES

SEQ ID NO: 1991 - DNA, 75 bp, Paenibacillus harenae
  CDS (1)..(75)
atgacaatggcaggcccaggcattgcaacaccggacgccgtacaaccggacccaacggaagtgatccacttcagt

SEQ ID NO: 1992 - protein, 25 aa, Paenibacillus harenae
MTMAGPGIATPDAVQPDPTEVIHFS

SEQ ID NO: 1993 - DNA, 132 bp, Paenibacillus harenae
  CDS (1)..(132)
atgaagaaagaatggcagccactgacgttggaactccttgatgtcagcgcgaccatgggtggaccaaatggaatctatcctgacagaaacggcaaaggcaacaataatggtcaccctcatgctgaagaatcc

SEQ ID NO: 1994 - protein, 44 aa, Paenibacillus harenae
MKKEWQPLTLELLDVSATMGGPNGIYPDRNGKGNNNGHPHAEES

SEQ ID NO: 1995 - DNA, 132 bp, Aneurinibacillus migulanus; identical to SEQ ID NO: 1987
  CDS (1)..(132)

SEQ ID NO: 1996 - protein, 44 aa, Aneurinibacillus migulanus; identical to SEQ ID NO: 1988

SEQ ID NO: 1997 - DNA, 132 bp, Aneurinibacillus migulanus; identical to SEQ ID NO: 1989
  CDS (1)..(132)

SEQ ID NO: 1998 - protein, 44 aa, Aneurinibacillus migulanus; identical to SEQ ID NO: 1990

SEQ ID NO: 1999 - DNA, 123 bp, Bacillus sp.
  CDS (1)..(123)
atgaaaaaggaatggagcgtacctgtactggaagtccttgacatgaacatgacaatggctggtcccggaaatgcaattccggatggagttcagcccgatccggatgagctcgttcactacagc

SEQ ID NO: 2000 - protein, 41 aa, Bacillus sp.
MKKEWSVPVLEVLDMNMTMAGPGNAIPDGVQPDPDELVHYS

SEQ ID NO: 2001 - DNA, 111 bp, Bacillus sp.
  CDS (1)..(111)
atgttagaagtacttgatattaatatgactatggctggaccaggaattaaaacacctgatgcagttcaaccagatccggatgcacctctaaaggatcaagtacattatagt

SEQ ID NO: 2002 - protein, 37 aa, Bacillus sp.
MLEVLDINMTMAGPGIKTPDAVQPDPDAPLKDQVHYS

SEQ ID NO: 2003 - DNA, 123 bp, Bacillus sp.
  CDS (1)..(123)
atgaaaaaagagtggaagaagccagtactagaagtacttgatgtaaatatgactatggccggtccaggaactagtattcctgatgcggtacagccagatccagacgaaacagttcactacagc

SEQ ID NO: 2004 - protein, 41 aa, Bacillus sp.
MKKEWKKPVLEVLDVNMTMAGPGTSIPDAVQPDPDETVHYS

SEQ ID NO: 2005 - DNA, 123 bp, Bacillus boroniphilus
  CDS (1)..(123)
atgaaaaagcaatggcaaaaaccagagttagaagtacttaatgtcactatgacaatggctggaccaggaattaaaactcctgatgctgttcaaccggaccaagacgaaatggttcactatagt

SEQ ID NO: 2006 - protein, 41 aa, Bacillus boroniphilus
MKKQWQKPELEVLNVTMTMAGPGIKTPDAVQPDQDEMVHYS

SEQ ID NO: 2007 - DNA, 123 bp, Paenibacillus solani
  CDS (1)..(123)
atgaaacaggaatggagcgtacccgtactggaagtccttgacatgaatatgacaatggctggtcccggaagtgcaattccggatggagttcagcccgatccggatgagatggttcactacagc

SEQ ID NO: 2008 - protein, 41 aa, Paenibacillus solani
MKQEWSVPVLEVLDMNMTMAGPGSAIPDGVQPDPDEMVHYS

SEQ ID NO: 2009 - DNA, 135 bp, Bacillus sp.
  CDS (1)..(135)
atgaaaaaacaatggaaagctccagagttagaagtgcttaatattagtatgacgatggctggtcctggaataaaaactccagatgcagttcagccagatccggatgctgatgaaaatgatgtagttcattatagc

SEQ ID NO: 2010 - protein, 45 aa, Bacillus sp.
MKKQWKAPELEVLNISMTMAGPGIKTPDAVQPDPDADENDVVHYS

SEQ ID NO: 2011 - DNA, 123 bp, Bacillus sp.; identical to SEQ ID NO: 2003
  CDS (1)..(123)

SEQ ID NO: 2012 - protein, 41 aa, Bacillus sp.; identical to SEQ ID NO: 2004

SEQ ID NO: 2013 - DNA, 123 bp, Bacillus sp.; identical to SEQ ID NO: 2003
  CDS (1)..(123)

SEQ ID NO: 2014 - protein, 41 aa, Bacillus sp.; identical to SEQ ID NO: 2004

SEQ ID NO: 2015 - DNA, 123 bp, Bacillus aryabhattai
  CDS (1)..(123)
atgaaaaaagagtggaagaagccagtactagaagtacttgatgtaaatatgacgatggccggtccaggaactagtattcctgatgcggtacagccagatccagacgaagatgttcactacagc

SEQ ID NO: 2016 - protein, 41 aa, Bacillus aryabhattai
MKKEWKKPVLEVLDVNMTMAGPGTSIPDAVQPDPDEDVHYS

SEQ ID NO: 2017 - DNA, 123 bp, Bacillus sp.; identical to SEQ ID NO: 2003
  CDS (1)..(123)

SEQ ID NO: 2018 - protein, 41 aa, Bacillus sp.; identical to SEQ ID NO: 2004

SEQ ID NO: 2019 - DNA, 99 bp, Bacillus vietnamensis
  CDS (1)..(99)
atggcatctaccgtatggggaccatatactgatgaagcttacgtacctggtgaagacgtagataaagatgatccaaaaacatgggaccgctttacgagc

SEQ ID NO: 2020 - protein, 33 aa, Bacillus vietnamensis
MASTVWGPYTDEAYVPGEDVDKDDPKTWDRFTS

SEQ ID NO: 2021 - DNA, 123 bp, Bacillus sp.
  CDS (1)..(123)
atgaaaaagcaatggagtgagcctgctttggaggtactggacatgaagatgacgatggctggtcctggtaacgcgatcccggacggtgtacaaccggatcccgatgaattggtccatactagc

SEQ ID NO: 2022 - protein, 41 aa, Bacillus sp.
MKKQWSEPALEVLDMKMTMAGPGNAIPDGVQPDPDELVHTS

SEQ ID NO: 2023 - DNA, 99 bp, Bacillus cereus
  CDS (1)..(99)
atggcttctacagtctttggaccgtataccgatgaagcatatgtgccaggtaagccagaagatcctaataatcctggtacttggaatcgctttacgagt

SEQ ID NO: 2024 - protein, 33 aa, Bacillus cereus
MASTVFGPYTDEAYVPGKPEDPNNPGTWNRFTS

SEQ ID NO: 2025 - DNA, 135 bp, Bacillus sp.; identical to SEQ ID NO: 2009
  CDS (1)..(135)

SEQ ID NO: 2026 - protein, 45 aa, Bacillus sp.; identical to SEQ ID NO: 2010

SEQ ID NO: 2027 - DNA, 123 bp, Bacillus weihenstephanensis; identical to SEQ ID NO: 1921
  CDS (1)..(123)

SEQ ID NO: 2028 - protein, 41 aa, Bacillus weihenstephanensis; identical to SEQ ID NO: 1922

SEQ ID NO: 2029 - DNA, 129 bp, Bacillus timonensis
  CDS (1)..(129)
atgaaaaaagattggaacaaaccaacactattagtattagatgtaaaaatgacaatggctggtcaagatggacctgcaactgatgcagcgtttccaaatggtactctcaagggagatttaacattttgt

SEQ ID NO: 2030 - protein, 43 aa, Bacillus timonensis
MKKDWNKPTLLVLDVKMTMAGQDGPATDAAFPNGTLKGDLTFC

SEQ ID NO: 2031 - DNA, 132 bp, Gorillibacterium massiliense
  CDS (1)..(132)
atgtccaaaaaagaatggatccaaccgtccttggaggaactcagcatcaaaatgaccctgcaaggttctgcatccactgaaatcgacgccactttctctgacgtcaatgaaacggtacatctgcacgggagc

SEQ ID NO: 2032 - protein, 44 aa, Gorillibacterium massiliense
MSKKEWIQPSLEELSIKMTLQGSASTEIDATFSDVNETVHLHGS

SEQ ID NO: 2033 - DNA, 105 bp, Bacillus pseudalcaliphilus
  CDS (1)..(105)
atgctagatatttccttaaccatggcacaaacaactaatggtccttttacagatgaggcatatgtacctggagagtggtcagaagaccctcgttttacaccgagc

SEQ ID NO: 2034 - protein, 35 aa, Bacillus pseudalcaliphilus
MLDISLTMAQTTNGPFTDEAYVPGEWSEDPRFTPS

SEQ ID NO: 2035 - DNA, 78 bp, Bacillus endophyticus
  CDS (1)..(78)
atggcaggacctgggctaagctaccctgatgcagtgcaaccagatccagatccagaggacgcaatgcatcatgatagt

SEQ ID NO: 2036 - protein, 26 aa, Bacillus endophyticus
MAGPGLSYPDAVQPDPDPEDAMHHDS

SEQ ID NO: 2037 - DNA, 78 bp, Bacillus endophyticus; identical to SEQ ID NO: 2035
  CDS (1)..(78)

SEQ ID NO: 2038 - protein, 26 aa, Bacillus endophyticus
MAGPGLSYPDAVQPDPDPEDAMHHDS

SEQ ID NO: 2039 - DNA, 123 bp, Paenibacillus sp.
  CDS (1)..(123)
atgaagaaagaatggcaagcacccgctttagaaatccttgatgtgaacatgacgatggcaggtcccggcgaagcactcccggacggagtacaaccagatccagacgaaactgtacatcatagc

SEQ ID NO: 2040 - protein, 41 aa, Paenibacillus sp.
MKKEWQAPALEILDVNMTMAGPGEALPDGVQPDPDETVHHS

SEQ ID NO: 2041 - DNA, 123 bp, Paenibacillus sp.
  CDS (1)..(123)
atgaaaaaggaatacagcaagcctgctttggaagtgctcgacgttaaaatgactatggctggaccaggatttaaactcgccgactccttccaagatgatccggatgagatcgtgcactactcc

SEQ ID NO: 2042 - protein, 41 aa, Paenibacillus sp.
MKKEYSKPALEVLDVKMTMAGPGFKLADSFQDDPDEIVHYS

SEQ ID NO: 2043 - DNA, 207 bp, Cohnella thermotolerans
  CDS (1)..(207)
atggcagacgcccgagctcgaaacgctgaacgtcagcgaaacgatgtacgggaaaggcatgacgaatatcgacttcgtcacgacagaagacatggacatttactctccgagttgatcggcagcttcctcatcttgcgtccttatacaatccgttccggacggtataaggacgccgcctttccatttgccagaaaaaagcgaggaagg

SEQ ID NO: 2044 - protein, 69 aa, Cohnella thermotolerans
MADARARNAERQRNDVRERHDEYRLRHDRRHGHLLSELIGSFLILRPYTIRSGRYKDAAFPFARKKRGR

SEQ ID NO: 2045 - DNA, 138 bp, Cohnella thermotolerans
  CDS (1)..(138)
atggagaagcaagcgaagaacgaatggctgcagccggttctggaagtgctcgacgccagccagacgatgggcgggcctaacggcatctaccccgataaaaacgggaaaggccacaataacggtcatccccatgcctcg

SEQ ID NO: 2046 - protein, 46 aa, Cohnella thermotolerans
MEKQAKNEWLQPVLEVLDASQTMGGPNGIYPDKNGKGHNNGHPHAS

SEQ ID NO: 2047 - DNA, 123 bp, Paenibacillus sp.
  CDS (1)..(123)
atgaagaaggaatacagcaagcctgaattggaagtgctcgacgtcaaaatgacaatggctggacctggtatcgctatcgtcgactcattccaggatgatccagatgaaattcaacactactcc

SEQ ID NO: 2048 - protein, 41 aa, Paenibacillus sp.
MKKEYSKPELEVLDVKMTMAGPGIAIVDSFQDDPDEIQHYS

SEQ ID NO: 2049 - DNA, 123 bp, Bacillus muralis
  CDS (1)..(123)
atgaaaaaggagtgggaaaaaccaaagttagaaatacttaatgttaacatgacaatggctggaccaggaaggaggcttccggatgcgatacagccagatccagatgatccggtaaaattcagc

SEQ ID NO: 2050 - protein, 41 aa, Bacillus muralis
MKKEWEKPKLEILNVNMTMAGPGRRLPDAIQPDPDDPVKFS

SEQ ID NO: 2051 - DNA, 123 bp, Paenibacillus lactis
  CDS (1)..(123)
atgaaaaaagaatggaacgtaccttcccttgaaattcttgatgtcaacatgacaatggcgggtcctggaagctcactcccggatgcagttcaaccggatccagacgagcacgtcaactatagc

SEQ ID NO: 2052 - protein, 41 aa, Paenibacillus lactis
MKKEWNVPSLEILDVNMTMAGPGSSLPDAVQPDPDEHVNYS

SEQ ID NO: 2053 - DNA, 135 bp, Alicyclobacillus ferrooxydans
  CDS (1)..(135)
atgaaaaagaattggaaaaaaccggaaatagaagtattggatgtaaacatgacaatgacatccctgaccgggaccaaagtgactgatcaagtctatccggcagatacttacattccgtcagagagggttattagt

SEQ ID NO: 2054 - protein, 45 aa, Alicyclobacillus ferrooxydans
MKKNWKKPEIEVLDVNMTMTSLTGTKVTDQVYPADTYIPSERVIS

SEQ ID NO: 2055 - DNA, 135 bp, Bacillus sp.
  CDS (1)..(135)
atggagaaattagaatggaaagaacctaagttagaagtgttagaagttagtaaaacaatggctagcacatttgataacaactcgttagataatacgtatccagctggaactgcatggggtgatctaggctggagt

SEQ ID NO: 2056 - protein, 45 aa, Bacillus sp.
MEKLEWKEPKLEVLEVSKTMASTFDNNSLDNTYPAGTAWGDLGWS

SEQ ID NO: 2057 - DNA, 135 bp, Bacillus sp.; identical to SEQ ID NO: 2055
  CDS (1)..(135)

SEQ ID NO: 2058 - protein, 45 aa, Bacillus sp.; identical to SEQ ID NO: 2056

SEQ ID NO: 2059 - DNA, 123 bp, Paenibacillus sp.
  CDS (1)..(123)
atgaaaaaggaatacagcaagcctgcattggaagttctggatgttaaaatgactatggctggacctgggatcgctattgccgactccttccaatcggatccggaagaaatcgttagtcactcc

SEQ ID NO: 2060 - protein, 41 aa, Paenibacillus sp.
MKKEYSKPALEVLDVKMTMAGPGIAIADSFQSDPEEIVSHS

SEQ ID NO: 2061 - DNA, 138 bp, Ornithinibacillus californiensis
gtggaatcgttgaagaaagaatggaagcagccggcattagaaatccttgattttcgttatacattaatgggtcctggaataagagatgttgattttacttacgaagatgaggatgaggtagcacatcttcataaaagc

SEQ ID NO: 2062 - protein, 46 aa, Ornithinibacillus californiensis
MESLKKEWKQPALEILDFRYTLMGPGIRDVDFTYEDEDEVAHLHKS

SEQ ID NO: 2063 - DNA, 123 bp, Paenibacillus sp.; identical to SEQ ID NO: 2059
  CDS (1)..(123)

SEQ ID NO: 2064 - protein, 41 aa, Paenibacillus sp.; identical to SEQ ID NO: 2060

SEQ ID NO: 2065 - DNA, 123 bp, Paenibacillus sp.
  CDS (1)..(123)
atgaaaaaggaatacagcaagcctgcattggaagttctggatgttaaaatgactatggctggacctgggatcgctattgccgactccttccaatcggatccggaagaaatcgttaatcactcc

SEQ ID NO: 2066 - protein, 41 aa, Paenibacillus sp.
MKKEYSKPALEVLDVKMTMAGPGIAIADSFQSDPEEIVNHS

SEQ ID NO: 2067 - DNA, 123 bp, Paenibacillus sp.
  CDS (1)..(123)
atgaaaaaggaatacagcaagcctgctttggaagtgctcgacgtgaaaatgactatggctggaccaggaatatctattgccgactccttccaagatgatccggatgagatcgtacattattcc

SEQ ID NO: 2068 - protein, 41 aa, Paenibacillus sp.
MKKEYSKPALEVLDVKMTMAGPGISIADSFQDDPDEIVHYS

SEQ ID NO: 2069 - DNA, 123 bp, Paenibacillus sp.
  CDS (1)..(123)
atgaaaaaggaatacagcaagcctgcattggaagtgttggatgtgaaaatgactatggctggcccgggggtatccattgccgatgcgttccaagccgatccagatgaaatcgttagtcactcc

SEQ ID NO: 2070 - protein, 41 aa, Paenibacillus sp.
MKKEYSKPALEVLDVKMTMAGPGVSIADAFQADPDEIVSHS

SEQ ID NO: 2071 - DNA, 123 bp, Paenibacillus camerounensis
  CDS (1)..(123)
atgaaaaaggaatacagcaagcctgctttggaagtactcgacgttaagatgactatggctggaccgggactggcaatcgccgactccttccaaagtgatccggatgagatcgtacatcactcc

SEQ ID NO: 2072 - protein, 41 aa, Paenibacillus camerounensis
MKKEYSKPALEVLDVKMTMAGPGLAIADSFQSDPDEIVHHS

SEQ ID NO: 2073 - DNA, 123 bp, Paenibacillus camerounensis; identical to SEQ ID NO: 2071
  CDS (1)..(123)

SEQ ID NO: 2074 - protein, 41 aa, Paenibacillus camerounensis; identical to SEQ ID NO: 2072

SEQ ID NO: 2075 - DNA, 129 bp, Jeotgalibacillus campisalis
  CDS (1)..(129)
atgaaaaaggaatggaaaacaccagaagttgaattgctgacagttcaaatgacgatgcttggacataatggagacgatttggataacgattttgaagacggcacacctcgtggcgatcttactttcagc

SEQ ID NO: 2076 - protein, 43 aa, Jeotgalibacillus campisalis
MKKEWKTPEVELLTVQMTMLGHNGDDLDNDFEDGTPRGDLTFS

SEQ ID NO: 2077 - DNA, 126 bp, Paenibacillus polymyxa; identical to SEQ ID NO: 829
  CDS (1)..(126)

SEQ ID NO: 2078 - protein, 42 aa, Paenibacillus polymyxa; identical to SEQ ID NO: 830

SEQ ID NO: 2079 - DNA, 123 bp, Paenibacillus camerounensis; identical to SEQ ID NO: 2071
  CDS (1)..(123)

SEQ ID NO: 2080 - protein, 41 aa, Paenibacillus camerounensis; identical to SEQ ID NO: 2072

SEQ ID NO: 2081 - DNA, 129 bp, Paenibacillus sp.
  CDS (1)..(129)
atggaaaaaaaggaatggcaagcaccagcactggaagtattggaagtgaaccaaacaatggcgggcgtaggttacaaacagatcgactggattactgtccacgatgctgatctctacgatccaacttcc

SEQ ID NO: 2082 - protein, 43 aa, Paenibacillus sp.
MEKKEWQAPALEVLEVNQTMAGVGYKQIDWITVHDADLYDPTS

SEQ ID NO: 2083 - DNA, 126 bp, Paenibacillus sp.
  CDS (1)..(126)
atggaaaaaaaggaatggcaagcaccagcactggaaatattggaagtcaaccaaacaatggcgggcacaggttacaaacatatcgactgggttacggttcacgatgcggatctctacggaacaagt

SEQ ID NO: 2084 - protein, 42 aa, Paenibacillus sp.
MEKKEWQAPALEILEVNQTMAGTGYKHIDWVTVHDADLYGTS

SEQ ID NO: 2085 - DNA, 129 bp, Paenibacillus sp.
  CDS (1)..(129)
atggaaaaaaaggaatggcaagcaccagctcttgaagtgttggaagtcaatcaaacaatggccggtactggctacagacaaattgactggatcacggttcacgatgcggatctgtacgatccaacttcc

SEQ ID NO: 2086 - protein, 43 aa, Paenibacillus sp.
MEKKEWQAPALEVLEVNQTMAGTGYRQIDWITVHDADLYDPTS

SEQ ID NO: 2087 - DNA, 132 bp, Paenibacillus sp.
  CDS (1)..(132)
atgcaaaagaaagaatggctagcaccagcactggaagtgttggaagtgaaccaaaccatggcgggaacaggatacagacaaattgactggataactgttcacgatgctgacatgtacgacccgcctacttcc

SEQ ID NO: 2088 - protein, 44 aa, Paenibacillus sp.
MQKKEWLAPALEVLEVNQTMAGTGYRQIDWITVHDADMYDPPTS

SEQ ID NO: 2089 - DNA, 123 bp, Paenibacillus sp.; identical to SEQ ID NO: 2069
  CDS (1)..(123)

SEQ ID NO: 2090 - protein, 41 aa, Paenibacillus sp.; identical to SEQ ID NO: 2070

SEQ ID NO: 2091 - DNA, 129 bp, Paenibacillus sp.
  CDS (1)..(129)
atggaaaaaaaggaatggcaagcaccagctcttgaagtgttggaagtcaatcaaacgatggccggtactggctacagacaaattgactgggtaacggttcacgatgcggatctgtacgatccaacttcc

SEQ ID NO: 2092 - protein, 43 aa, Paenibacillus sp.
MEKKEWQAPALEVLEVNQTMAGTGYRQIDWVTVHDADLYDPTS

SEQ ID NO: 2093 - DNA, 126 bp, Paenibacillus sp.
  CDS (1)..(126)
atggaaaaaaaggaatggcaagcaccagcactggaaatattggaagtcaaccaaacaatggcgggcgcaggttacaaacatatcgactgggttacggttcacgatgcggatctctacggaactagt

SEQ ID NO: 2094 - protein, 42 aa, Paenibacillus sp.
MEKKEWQAPALEILEVNQTMAGAGYKHIDWVTVHDADLYGTS

SEQ ID NO: 2095 - DNA, 123 bp, Paenibacillus camerounensis; identical to SEQ ID NO: 2071
  CDS (1)..(123)

SEQ ID NO: 2096 - protein, 41 aa, Paenibacillus camerounensis; identical to SEQ ID NO: 2072

SEQ ID NO: 2097 - DNA, 138 bp, Paenibacillus sp.
  CDS (1)..(138)
atgcaaatcgaaaaaaagcaatggcaagctccagcacttgaagttttggaagtaaaccaaaccctcgcaggtaaaggttacagacaaatcgactggatcacagaacacgatgctgatctgtatgatccacctgtttcc

SEQ ID NO: 2098 - protein, 46 aa, Paenibacillus sp.
MQIEKKQWQAPALEVLEVNQTLAGKGYRQIDWITEHDADLYDPPVS

SEQ ID NO: 2099 - DNA, 207 bp, Cohnella thermotolerans; identical to SEQ ID NO: 2043
  CDS (1)..(207)

SEQ ID NO: 2100 - protein, 69 aa, Cohnella thermotolerans; identical to SEQ ID NO: 2044

SEQ ID NO: 2101 - DNA, 135 bp, Cohnella thermotolerans
  CDS (1)..(135)
atggaaatccgcgcgaaacaagaatggcagacgcccgagctcgaaacgctgaacgtcagcgaaacgatgtacgggaaaggcatgacgaatatcgacttcgtcacgacagaagacatggacatttactctccgagt

SEQ ID NO: 2102 - protein, 45 aa, Cohnella thermotolerans
MEIRAKQEWQTPELETLNVSETMYGKGMTNIDFVTTEDMDIYSPS

SEQ ID NO: 2103 - DNA, 126 bp, Paenibacillus polymyxa; identical to SEQ ID NO: 943
  CDS (1)..(126)

SEQ ID NO: 2104 - protein, 42 aa, Paenibacillus polymyxa; identical to SEQ ID NO: 944

SEQ ID NO: 2105 - DNA, 123 bp, Bacillus gobiensis
  CDS (1)..(123)
atgaaaaagacttggaacgagcctactcttgaagtattgaacatgaatcaaacaatggctggtaaaggtactacttgcattgacattgtctctgacgatgacttagacatcaccaaccctagc

SEQ ID NO: 2106 - protein, 41 aa, Bacillus gobiensis
MKKTWNEPTLEVLNMNQTMAGKGTTCIDIVSDDDLDITNPS

SEQ ID NO: 2107 - DNA, 126 bp, Paenibacillus dendritiformis
  CDS (1)..(126)
atgaaaaagcagtacagcaagccgtcccttgaagtgttggatgttcatcagaccatggctggcccgggtacctctaccccggatgctttccagccggacccggatgaagacgtgcattacgatagc

SEQ ID NO: 2108 - protein, 42 aa, Paenibacillus dendritiformis
MKKQYSKPSLEVLDVHQTMAGPGTSTPDAFQPDPDEDVHYDS

SEQ ID NO: 2109 - DNA, 123 bp, Fictibacillus macauensis
  CDS (1)..(123)
atgaaaaaagagtggaacacaccagtattagaagtacttgatgtaaacatgacaatggctggacctggtctcagaatcgctgacgcagtgcaaccggatgaagacgaaacggtacactacagc

SEQ ID NO: 2110 - protein, 41 aa, Fictibacillus macauensis
MKKEWNTPVLEVLDVNMTMAGPGLRIADAVQPDEDETVHYS

SEQ ID NO: 2111 - DNA, 132 bp, Bacillus bogoriensis
  CDS (1)..(132)
atgaaaaaagaatggcaaacaccatcactagaagtgttagaagtacaaatgacgatggctaatccaaataatggggatcatcttgaccaaacttatccagatggaacaccgagagaagatttgacatggagt

SEQ ID NO: 2112 - protein, 44 aa, Bacillus bogoriensis
MKKEWQTPSLEVLEVQMTMANPNNGDHLDQTYPDGTPREDLTWS

SEQ ID NO: 2113 - DNA, 117 bp, Paenibacillus sp.
  CDS (1)..(117)
atggaatggcaaatacctagccttgaagttcttgaaatgagtgagactaagcaaggaactggattcagacaaattgactggatctccgagcatgatgcggatttgtatgatcctagc

SEQ ID NO: 2114 - protein, 39 aa, Paenibacillus sp.
MEWQIPSLEVLEMSETKQGTGFRQIDWISEHDADLYDPS

SEQ ID NO: 2115 - DNA, 132 bp, Paenibacillus harenae; identical to SEQ ID NO: 1993
  CDS (1)..(132)

SEQ ID NO: 2116 - protein, 44 aa, Paenibacillus harenae; identical to SEQ ID NO: 1994

SEQ ID NO: 2117 - DNA, 132 bp, Bacillus bogoriensis; identical to SEQ ID NO: 2111
  CDS (1)..(132)

SEQ ID NO: 2118 - protein, 44 aa, Bacillus bogoriensis; identical to SEQ ID NO: 2112

SEQ ID NO: 2119 - DNA, 126 bp, Thermobacillus composti
  CDS (1)..(126)
atgcgcaagaaggaatggcagacgcccgaactggaagtgctggacgttcggttgacggcggctggtccgggtaaggcgaaaccggacgccgtgcagccggatgaagacgaaatcgtgcactacagc

SEQ ID NO: 2120 - protein, 42 aa, Thermobacillus composti
MRKKEWQTPELEVLDVRLTAAGPGKAKPDAVQPDEDEIVHYS

SEQ ID NO: 2121 - DNA, 111 bp, Paenibacillus sp.; identical to SEQ ID NO: 1909
  CDS (1)..(111)

SEQ ID NO: 2122 - protein, 37 aa, Paenibacillus sp.; identical to SEQ ID NO: 1910

SEQ ID NO: 2123 - DNA, 123 bp, Jeotgalibacillus malaysiensis
  CDS (1)..(123)
atgaagaaaaaatggacaacgatttcgttagaatctattgaagttgataaaacatttgccggtccagggaaaagaattgcagacgaataccagtgtgatccagatgagacagtgaattacagt

SEQ ID NO: 2124 - protein, 41 aa, Jeotgalibacillus malaysiensis
MKKKWTTISLESIEVDKTFAGPGKRIADEYQCDPDETVNYS

SEQ ID NO: 2125 - DNA, 144 bp, Clostridium scatologenes
  CDS (1)..(144)
atggaaaagaaaatttggaatccaccagaatttttggaattaggagttcaaagtactgaaaaaagcaaaacgtggcaagggggtgttgatgcaacttggactgatggtagtggcaatacttgggagtcacactcaggtactatg

SEQ ID NO: 2126 - protein, 48 aa, Clostridium scatologenes
MEKKIWNPPEFLELGVQSTEKSKTWQGGVDATWTDGSGNTWESHSGTM

SEQ ID NO: 2127 - DNA, 132 bp, Clostridium saccharobutylicum
  CDS (1)..(132)
atgtggattgaaccagagattattgacttatctgtaaaagagactaaactaggcagtcatttctcaagcactccagatggagcaccatggcaagatgcaaatggtgactggcaagaaccacatggaaaatct

SEQ ID NO: 2128 - protein, 44 aa, Clostridium saccharobutylicum
MWIEPEIIDLSVKETKLGSHFSSTPDGAPWQDANGDWQEPHGKS

SEQ ID NO: 2129 - DNA, 126 bp, Streptococcus pneumoniae; identical to SEQ ID NO: 1579
  CDS (1)..(126)

SEQ ID NO: 2130 - protein, 42 aa, Streptococcus pneumoniae; identical to SEQ ID NO: 1580

SEQ ID NO: 2131 - DNA, 123 bp, Bacillus boroniphilus; identical to SEQ ID NO: 2005
  CDS (1)..(123)

SEQ ID NO: 2132 - protein, 41 aa, Bacillus boroniphilus; identical to SEQ ID NO: 2006

SEQ ID NO: 2133 - DNA, 123 bp, Bacillus boroniphilus; identical to SEQ ID NO: 2005
  CDS (1)..(123)

SEQ ID NO: 2134 - protein, 41 aa, Bacillus boroniphilus; identical to SEQ ID NO: 2006

SEQ ID NO: 2135 - DNA, 198 bp, Rivularia sp.
  CDS (1)..(198)
atgtctaagaaagtatacagcagacccgaattaagcgcttacggtgaatttgcaaacttgactcaacgcaccggttccggttttgctgacttcgaaggatctaccgacactggagttggtactgttacaactggtgctgaccctaacacttccgtaatcaataccccaaccggttctgttaactttactcctgcaagc

SEQ ID NO: 2136 - protein, 66 aa, Rivularia sp.
MSKKVYSRPELSAYGEFANLTQRTGSGFADFEGSTDTGVGTVTTGADPNTSVINTPTGSVNFTPAS

SEQ ID NO: 2137 - DNA, 177 bp, Lachnoclostridium phytofermentans
  CDS (1)..(177)
atgaaaaaggtatgggctaacccagaagttatcgaattagaaattaacaagacccagtacagtccaagaggtggatgggaaaaagatggcgaatatgtatcttctgatggcaagtatcatataactacttggggaccatcttcaggaaatagtggagagccatctgttggtgttaat

SEQ ID NO: 2138 - protein, 59 aa, Lachnoclostridium phytofermentans
MKKVWANPEVIELEINKTQYSPRGGWEKDGEYVSSDGKYHITTWGPSSGNSGEPSVGVN

SEQ ID NO: 2139 - DNA, 159 bp, Halomonas anticariensis
  CDS (1)..(159)
atgctagagttgaagcatgcaggggggaagggcgagtatgttcctcccgccgttttgcaactagggtcatcagctgacattacagcggctgggacggctatgaactctgatgatggagaaaatccagacacggcttttgacggggtgaccagcccatcc

SEQ ID NO: 2140 - protein, 53 aa, Halomonas anticariensis
MLELKHAGGKGEYVPPAVLQLGSSADITAAGTAMNSDDGENPDTAFDGVTSPS

SEQ ID NO: 2141 - DNA, 159 bp, Halomonas anticariensis
  CDS (1)..(159)
atgcgagaactagataaggcaaggggaaagggtgagtatgtcccacctattttattacgactggggtcatcggctgacatcaccgctgcccaaatgcaggcgaattccgatgatggagtcaatgccgacaacgctttcccaaacccgacagagtcatct

SEQ ID NO: 2142 - protein, 53 aa, Halomonas anticariensis
MRELDKARGKGEYVPPILLRLGSSADITAAQMQANSDDGVNADNAFPNPTESS

SEQ ID NO: 2143 - DNA, 159 bp, Halomonas anticariensis
  CDS (1)..(159)
atgcctgagtcgaaaggtacaggagggaaaggggagtatgctgcacctgtcgtgttacgactgggctcatcggctgtcataaccgctgcccaaatgcaagcgaattccgatgatgcaatcagtcccgacaacgccttcccgaacccgacagagtcatcc

SEQ ID NO: 2144 - protein, 53 aa, Halomonas anticariensis
MPESKGTGGKGEYAAPVVLRLGSSAVITAAQMQANSDDAISPDNAFPNPTESS

SEQ ID NO: 2145 - DNA, 162 bp, Unknown
  Description of Unknown: Candidate division sequence
  CDS (1)..(162)
atgtgttctgaacgtgtcgatcggttcgaagacaggaaggcacaaaagaaaagcaggaaaatatacgccacgccgaagctgaccgtccacggtggcgttgagcacatcacacagcagataggggatacgggatctgacctctttgtcggctcggtagttggc

SEQ ID NO: 2146 - protein, 54 aa, Unknown
  Description of Unknown: Candidate division sequence
MCSERVDRFEDRKAQKKSRKIYATPKLTVHGGVEHITQQIGDTGSDLFVGSVVG

SEQ ID NO: 2147 - DNA, 174 bp, Unknown
  Description of Unknown: Candidate division sequence
  CDS (1)..(174)
atgaccactgaaggcaaggactggctcggaaagaacacaaccgaagggcaaagaggaaagccgtatgctgcgccgaagctggttgtccacggcagcgccgagcgcatcacgcaatatggtggcggacaggaagccgatgttcagatgggctcgatgcttgagttggcaccgaaa

SEQ ID NO: 2148 - protein, 58 aa, Unknown
  Description of Unknown: Candidate division sequence
MTTEGKDWLGKNTTEGQRGKPYAAPKLVVHGSAERITQYGGGQEADVQMGSMLELAPK

SEQ ID NO: 2149 - DNA, 165 bp, Unknown
  Description of Unknown: Candidate division sequence
  CDS (1)..(165)
atgcacgctgaaagcggagaccgtttcgagaagaacacggcgcaagagcggagcaagaagccttacgcgaccccgagattgagcgaccacggcacggtcgaggagattacacgaggcacagcaccggggtcagcagacgcggttgccccgggctcacccgcgtta

SEQ ID NO: 2150 - protein, 55 aa, Unknown
  Description of Unknown: Candidate division sequence
MHAESGDRFEKNTAQERSKKPYATPRLSDHGTVEEITRGTAPGSADAVAPGSPAL

SEQ ID NO: 2151 - DNA, 165 bp, Unknown
  Description of Unknown: Candidate division sequence
  CDS (1)..(165)
atgactaccgacagcgacgagcggctcgacaggaaaaccgcggaagagcaaacaagaaagccgtacgctgtgcctgaactgagcgttcacggcacggtcgaggagatcacacagcaacttgcgggcgcggcgggcgatggcttgggcggctcgcctccgccatac

SEQ ID NO: 2152 - protein, 55 aa, Unknown
  Description of Unknown: Candidate division sequence
MTTDSDERLDRKTAEEQTRKPYAVPELSVHGTVEEITQQLAGAAGDGLGGSPPPY

SEQ ID NO: 2153 - DNA, 165 bp, Unknown
  Description of Unknown: Candidate division sequence
  CDS (1)..(165)
atgagctcctggaagctagatagtctccggaaacacgcggtgcagcacaggccgaaaaagccttatgccacgccaaagctgaccgttcacggcgacatagagaagatcacgctgaatattgggacgggggcggttgatctcttggacggttcccagattagtgga

SEQ ID NO: 2154 - protein, 55 aa, Unknown
  Description of Unknown: Candidate division sequence
MSSWKLDSLRKHAVQHRPKKPYATPKLTVHGDIEKITLNIGTGAVDLLDGSQISG

SEQ ID NO: 2155 - DNA, 177 bp, Unknown
  Description of Unknown: Candidate division sequence
  CDS (1)..(177)
atgactactgacagcgacgagcggcttgaccggaaagctgcggaagagcaaacaagaaagccctacgcgacgccgaagttgatcgtccacggcagcgccgagcgcatcacgcaagccggtgggggacagggagccgatattcagatgggctccgtgattgatctggtaataaaggcg

SEQ ID NO: 2156 - protein, 59 aa, Unknown
  Description of Unknown: Candidate division sequence
MTTDSDERLDRKAAEEQTRKPYATPKLIVHGSAERITQAGGGQGADIQMGSVIDLVIKA

SEQ ID NO: 2157 - DNA, 129 bp, Gracilibacillus boraciitolerans
  CDS (1)..(129)
atgaaacaagaatggaatgcgccacagttggaagtacttgatgtaaaggagacaatgttgggaccaggatataaatttgttgattttactttcagtgatattgatgaagtaggagaaattcatgctagt

SEQ ID NO: 2158 - protein, 43 aa, Gracilibacillus boraciitolerans
MKQEWNAPQLEVLDVKETMLGPGYKFVDFTFSDIDEVGEIHAS

SEQ ID NO: 2159 - DNA, 180 bp, Nostoc piscinale
  CDS (1)..(180)
atgaaaaaaacttacgaagcacccaaattaacaaactacggtagtgttgaaaacattacccacgcttttggtagaccaggtccaaaagatactttccaaatcggtaacgatcctactcagattcctggtgaagtactaggactagatggttctcaaaatggggtacttattccccaacca

SEQ ID NO: 2160 - protein, 60 aa, Nostoc piscinale
MKKTYEAPKLTNYGSVENITHAFGRPGPKDTFQIGNDPTQIPGEVLGLDGSQNGVLIPQP

SEQ ID NO: 2161 - DNA, 129 bp, Gracilibacillus boraciitolerans; identical to SEQ ID NO: 2157
  CDS (1)..(129)

SEQ ID NO: 2162 - protein, 43 aa, Gracilibacillus boraciitolerans; identical to SEQ ID NO: 2158

SEQ ID NO: 2163 - DNA, 192 bp, Nostoc sp.
  CDS (1)..(192)
atgaaaaaagcttacgaagctcccaaattaacaaactacggtagtgttcaaaacgttacacatgcgtttggtagaccaggagaaacggatactttccaaatcggtgacaatcctactcagtttcctggcgaagtactagggctagaaggttccgttaatggggtacttaatcccgtaccccgcgtaccccga

SEQ ID NO: 2164 - protein, 64 aa, Nostoc sp.
MKKAYEAPKLTNYGSVQNVTHAFGRPGETDTFQIGDNPTQFPGEVLGLEGSVNGVLNPVPRVPR

SEQ ID NO: 2165 - DNA, 117 bp, Crinalium epipsammum
  CDS (1)..(117)
atgcccgctctaacgatttatggcaacttggaagttttgacacaaggaggtaaggatggagaacagttagatgctagctttcccgttaatactccgaaaggaaagttaacattttca

SEQ ID NO: 2166 - protein, 39 aa, Crinalium epipsammum
MPALTIYGNLEVLTQGGKDGEQLDASFPVNTPKGKLTFS

SEQ ID NO: 2167 - DNA, 138 bp, Acaryochloris sp.
  CDS (1)..(138)
atgaaaaaattttatgactcacctcaactcagaacctacggaagcgtagaagatatgacgaagaatgcgccatcaatcaatgctattgatgtgccatttggaaccattcctgccggagatattgacgacattacatcc

SEQ ID NO: 2168 - protein, 46 aa, Acaryochloris sp.
MKKFYDSPQLRTYGSVEDMTKNAPSINAIDVPFGTIPAGDIDDITS

SEQ ID NO: 2169 - DNA, 138 bp, Acaryochloris sp.
  CDS (1)..(138)
atgaagagaacttatggtgcaccccaattgaaggtgtacggcagcgtagaggatatgactaagaattcaccgtcattgaatgctacagatgtgcctttcgggacaatccccgctggtgatattgatgatgtaacgtca

SEQ ID NO: 2170 - protein, 46 aa, Acaryochloris sp.
MKRTYGAPQLKVYGSVEDMTKNSPSLNATDVPFGTIPAGDIDDVTS

SEQ ID NO: 2171 - DNA, 105 bp, Methanobacterium lacus
  CDS (1)..(105)
atgaaaaaagtttacaaaaaaccagaattaaaagaacatggagatattaaatctttgacgaaaggtggagatataggaggatttgatcaagataatgctgctagt

SEQ ID NO: 2172 - protein, 35 aa, Methanobacterium lacus
MKKVYKKPELKEHGDIKSLTKGGDIGGFDQDNAAS

SEQ ID NO: 2173 - DNA, 108 bp, Methanobacterium arcticum
ttgaagaaaaaatatgaaaaacccgaattaaaaaaacatggtgatcttaaaaaaattactaaaggttttggtgtaggaggagcagatatgcagggtggtccagaaagc

SEQ ID NO: 2174 - protein, 36 aa, Methanobacterium arcticum
MKKKYEKPELKKHGDLKKITKGFGVGGADMQGGPES

SEQ ID NO: 2175 - DNA, 210 bp, Hassallia byssoidea
  CDS (1)..(210)
atgaagaaaagctacgaagtaccacaactggttaaacacggaagcgtcagcaatatcacggcttactctttcgacagtaaagacggcgatgtattttacggtcagacaaacgcaacaaaccaaaatggtactggttcactgaatgcttgcataacctacaaaaccggtctgaagaaaggtgattgcgtgaatccttccgcgaagggtgtg

SEQ ID NO: 2176 - protein, 70 aa, Hassallia byssoidea
MKKSYEVPQLVKHGSVSNITAYSFDSKDGDVFYGQTNATNQNGTGSLNACITYKTGLKKGDCVNPSAKGV

SEQ ID NO: 2177 - DNA, 210 bp, Hassallia byssoidea
  CDS (1)..(210)
atgaagaaaagctacgaagcaccacaactcgtcaaacacggaagcgtcagcaatatcacggcttactctttcgacagtaaagacggcgatgtattttacggtcagacgaacgcaacaaaccaaaatggtactggttcactgaatgcttgcataacctacaaaaccggtccgaagaaaggtgattgcgtgaatccttccgcgaagggtgtg

SEQ ID NO: 2178 - protein, 70 aa, Hassallia byssoidea
MKKSYEAPQLVKHGSVSNITAYSFDSKDGDVFYGQTNATNQNGTGSLNACITYKTGPKKGDCVNPSAKGV

SEQ ID NO: 2179 - DNA, 138 bp, Acaryochloris marina
  CDS (1)..(138)
atgaaaaaattttatgacgcacctcaactcagaacctacggaagcgtagaagatatgacgaagaatgcgccatcaatcaatgccattgatgtgccctttggaaccattcctcctggagatatcgacgacattacatcc

SEQ ID NO: 2180 - protein, 46 aa, Acaryochloris marina
MKKFYDAPQLRTYGSVEDMTKNAPSINAIDVPFGTIPPGDIDDITS

SEQ ID NO: 2181 - DNA, 138 bp, Acaryochloris marina
  CDS (1)..(138)
atgaaaagaacctatggtgcaccccaattgaaggtgtacggcagcgtagaagatatgactaagaattcaccgtcattgaatgctacagatgtgcctttcgggacaattcccgttggtgatattgatgatgtaacgtca

SEQ ID NO: 2182 - protein, 46 aa, Acaryochloris marina
MKRTYGAPQLKVYGSVEDMTKNSPSLNATDVPFGTIPVGDIDDVTS

SEQ ID NO: 2183 - DNA, 129 bp, Methanobacterium formicicum
  CDS (1)..(129)
atgatacaaaaaggcatttacaaaaaacccaaactgattacccatggcaatgtggatgacattactcttggaacagctccaggtggactcgaagaacccgggggtaaacaaccttcaggtggtccagtt

SEQ ID NO: 2184 - protein, 43 aa, Methanobacterium formicicum
MIQKGIYKKPKLITHGNVDDITLGTAPGGLEEPGGKQPSGGPV

SEQ ID NO: 2185 - DNA, 117 bp, Methanobacterium formicicum
  CDS (1)..(117)
atgtccattaaagaaaaaaaatgttataaaaaacctgaaataaaaattcatggagatttaagaaaaataacaaaagacaaatctggattaggtggagatgcagggggactagcatct

SEQ ID NO: 2186 - protein, 39 aa, Methanobacterium formicicum
MSIKEKKCYKKPEIKIHGDLRKITKDKSGLGGDAGGLAS

SEQ ID NO: 2187 - DNA, 138 bp, Stanieria cyanosphaera
  CDS (1)..(138)
atgagcaaaaaagcatacactcaacctcaactatccgttcacggtaacgttgaaactttaactcaaaaaactaaagtaggaacaaagctagatgctagttttgaagcaggtactcctctgactgaacttactatttcc

SEQ ID NO: 2188 - protein, 46 aa, Stanieria cyanosphaera
MSKKAYTQPQLSVHGNVETLTQKTKVGTKLDASFEAGTPLTELTIS

SEQ ID NO: 2189 - DNA, 126 bp, Methanobacterium paludis
  CDS (1)..(126)
atgaaagacaaaaaatcgttgtatcaaaaacccgaactcaaaatttatggaaatttgaaagaacacactaaaggaactcaatctggcggagtagagaataactcatttagaccatccggtccagaa

SEQ ID NO: 2190 - protein, 42 aa, Methanobacterium paludis
MKDKKSLYQKPELKIYGNLKEHTKGTQSGGVENNSFRPSGPE

SEQ ID NO: 2191 - DNA, 123 bp, Rubellimicrobium mesophilum
  CDS (1)..(123)
atgtcggcctaccgggctccgaccctcaaggtcttcggcagcgtggtcgagctgaccgcgagcgggtccaagatcggcaaggaaggcaagggtcagcaatccatcggcgacacgcgcaagccc

SEQ ID NO: 2192 - protein, 41 aa, Rubellimicrobium mesophilum
MSAYRAPTLKVFGSVVELTASGSKIGKEGKGQQSIGDTRKP

SEQ ID NO: 2193 - DNA, 156 bp, Rubellimicrobium mesophilum
  CDS (1)..(156)
atgtcgaacaggctggattctctgcgggacggtcttcggacctatcgcgccccgaggctgatcgtcctcggccgcatggtcgagctgaccgcgagcggctcgcgcctgggcagggaaggcaagggccaccagtcctccgatagcagccgcaggccc

SEQ ID NO: 2194 - protein, 52 aa, Rubellimicrobium mesophilum
MSNRLDSLRDGLRTYRAPRLIVLGRMVELTASGSRLGREGKGHQSSDSSRRP

SEQ ID NO: 2195 - DNA, 171 bp, Nostoc sp.
  CDS (1)..(171)
atgaaaaaagcttacattgctcccaaattgacagttcacggtagtgttgaagatgttaccaatgcttttggaacacccggcgcaaatgatacagtgcaatttgccggtcaaactttccctggtgagctatttggtgccagtggttctataaacggtagtatcgaccctgca

SEQ ID NO: 2196 - protein, 57 aa, Nostoc sp.
MKKAYIAPKLTVHGSVEDVTNAFGTPGANDTVQFAGQTFPGELFGASGSINGSIDPA

SEQ ID NO: 2197 - DNA, 195 bp, Scytonema tolypothrichoides
  CDS (1)..(195)
atgaaaagttcttacactgctcccaagctgactgttcacggtaatgttgccgacattacacaaattactaatggtgatacaaggaaagattttctatttttgaacggtaccgttacatctgatggtaatgacctcggttcaaaagatgtctgccttggaacaactccaaaaggacctaactgcgatcctaaatac

SEQ ID NO: 2198 - protein, 65 aa, Scytonema tolypothrichoides
MKSSYTAPKLTVHGNVADITQITNGDTRKDFLFLNGTVTSDGNDLGSKDVCLGTTPKGPNCDPKY

SEQ ID NO: 2199 - DNA, 156 bp, Fischerella sp.
  CDS (1)..(156)
atgtttggtactagtaaacgagaagatttcttattcttcagtggtaatgcttcttcccccaacggaaccgttagtcttactggcggtacgggttctgtagacggtattctgtttaggtgcgatgagaacggtctaccagagaagtgcccaaagaag

SEQ ID NO: 2200 - protein, 52 aa, Fischerella sp.
MFGTSKREDFLFFSGNASSPNGTVSLTGGTGSVDGILFRCDENGLPEKCPKK

SEQ ID NO: 2201 - DNA, 192 bp, Leptolyngbya sp.
  CDS (1)..(192)
atgactaagaaaacatatactcagcctagcctgacagcttacggtagtgtagaaaaactaactaaagctaatggctctatcaatcttgcggatgtcttcatcctatctaacctacctggtgagcagcctgatccaattacggctgacggccagggctctatagatatcgagatcgatgttgaaggtgccatc

SEQ ID NO: 2202 - protein, 64 aa, Leptolyngbya sp.
MTKKTYTQPSLTAYGSVEKLTKANGSINLADVFILSNLPGEQPDPITADGQGSIDIEIDVEGAI

SEQ ID NO: 2203 - DNA, 105 bp, Butyrivibrio sp.
  CDS (1)..(105)
atggattgggagttcaaggatcagtggggcaacgtattccagagccacagcggaactgattataatgttgatcacagagagaatcgtgagcctgtagacgagcca

SEQ ID NO: 2204 - protein, 35 aa, Butyrivibrio sp.
MDWEFKDQWGNVFQSHSGTDYNVDHRENREPVDEP

SEQ ID NO: 2205 - DNA, 189 bp, Leptolyngbya sp.
  CDS (1)..(189)
atgactaagaaagcatatactcagcctagcctaactgcttacggtagtgtacaaacgctaaccaaaggtagtggcgctatcaacatcggagatagcgttattttcactaacctgcctggcggtgccaatgatctggaacttccaagcaatggttctgtagacgtaactattgactttgacgagctaact

SEQ ID NO: 2206 - protein, 63 aa, Leptolyngbya sp.
MTKKAYTQPSLTAYGSVQTLTKGSGAINIGDSVIFTNLPGGANDLELPSNGSVDVTIDFDELT

SEQ ID NO: 2207 - DNA, 117 bp, Methanobacterium sp.
  CDS (1)..(117)
atggatagtgaaaacaaaatagtttataaaaaacctaaagttgaaatacacggtaatatcaaaaccattacaaaaaaaagtggcagatatgatgatggggctaagcccgcctctcat

SEQ ID NO: 2208 - protein, 39 aa, Methanobacterium sp.
MDSENKIVYKKPKVEIHGNIKTITKKSGRYDDGAKPASH

SEQ ID NO: 2209 - DNA, 219 bp, Calothrix sp.
  CDS (1)..(219)
atgaagaaacaatacaacacgcccacacttattaatcacggttcagtacaaagtattactcaattaggaggtgggagtaaaagaaatgattttcttttctttagtgctgctgctgccgctgccgttggcgttaatccaaataccccagttctgacagctacaggttctacagatgctatcattaaattatgtaatgaacctggtgctaattgcccaaaa

SEQ ID NO: 2210 - protein, 73 aa, Calothrix sp.
MKKQYNTPTLINHGSVQSITQLGGGSKRNDFLFFSAAAAAAVGVNPNTPVLTATGSTDAIIKLCNEPGANCPK

SEQ ID NO: 2211 - DNA, 153 bp, Desulfocapsa sulfexigens
  CDS (1)..(153)
atgcctcctaaaaaattagagtattcaaaatctattcttattaatcatgggtctgttgtgaggctaactgctggatgtgcgggttcaggggccgattctggtacatatagtgagagttcatttattggtcccgatggttcatgtcagtcaact

SEQ ID NO: 2212 - protein, 51 aa, Desulfocapsa sulfexigens
MPPKKLEYSKSILINHGSVVRLTAGCAGSGADSGTYSESSFIGPDGSCQST

SEQ ID NO: 2213 - DNA, 141 bp, Erythrobacteraceae bacterium
  CDS (1)..(141)
atggccagctcgaccaaggcgacctatcagcgtcccacgctttccgtctacggcggctttgccaaactgaccgcggctggcagcgggttcttcagcgaaggccccaaccagggccccatggccaaggccacgcgcaagatc

SEQ ID NO: 2214 - protein, 47 aa, Erythrobacteraceae bacterium
MASSTKATYQRPTLSVYGGFAKLTAAGSGFFSEGPNQGPMAKATRKI

SEQ ID NO: 2215 - DNA, 162 bp, Candidatus Halobonum tyrrellensis
  CDS (1)..(162)
atgaaaggcagccaatcaaaccgggagtacacgtctcccgaagttaccgaattcggctcggttgaacagatcactgaaaagctaaacaagcaaggactgaagcctgaccagtacacggaggcgactaacggcgtcgtcgtcggttcgacccagccggcgaag

SEQ ID NO: 2216 - protein, 54 aa, Candidatus Halobonum tyrrellensis
MKGSQSNREYTSPEVTEFGSVEQITEKLNKQGLKPDQYTEATNGVVVGSTQPAK

SEQ ID NO: 2217 - DNA, 159 bp, Halopiger xanaduensis
  CDS (1)..(159)
atgtccggcaacaaagatagcagtcagtacagtccgcccgaactgactgaatacggctcgatcgaatcggtcacggaacaagtgaacaaggaaggagtggcgtccgaccagtggagtgagaacaccccgctcctcgggtccatccaacccgctccgacg

SEQ ID NO: 2218 - protein, 53 aa, Halopiger xanaduensis
MSGNKDSSQYSPPELTEYGSIESVTEQVNKEGVASDQWSENTPLLGSIQPAPT

SEQ ID NO: 2219 - DNA, 162 bp, Candidatus Halobonum tyrrellensis; identical to SEQ ID NO: 2215
  CDS (1)..(162)

SEQ ID NO: 2220 - protein, 54 aa, Candidatus Halobonum tyrrellensis; identical to SEQ ID NO: 2216

SEQ ID NO: 2221 - DNA, 141 bp, Oscillatoria sp.
  CDS (1)..(141)
atgaagagcgcagaaactaaagcaaacagccaaggcaaactgccttacaaaaaacccaccctaaccccatacggaagtatccaaaacatcactcaagggatatcgggaagcaatacggatgggatgggtggaaatcttgtt

SEQ ID NO: 2222 - protein, 47 aa, Oscillatoria sp.
MKSAETKANSQGKLPYKKPTLTPYGSIQNITQGISGSNTDGMGGNLV

SEQ ID NO: 2223 - DNA, 150 bp, Oscillatoria sp.
  CDS (1)..(150)
atgaagaacgcaggaaataaagcaaacagccaaggcaaactgccttacaaaaaacccactctaaccccctacggaagtatccaaaacatcactcaagcgacatcgggaagcaatacggatgggatggggggaaatatggcaccgccgtcg

SEQ ID NO: 2224 - protein, 50 aa, Oscillatoria sp.
MKNAGNKANSQGKLPYKKPTLTPYGSIQNITQATSGSNTDGMGGNMAPPS

SEQ ID NO: 2225 - DNA, 159 bp, Halosimplex carlsbadense
  CDS (1)..(159)
atggaaagagatacgagtgactacggtgtgcctgaactgaccgaatacgggtcggttgaggcgattacggaacagcaattcaacaaagacggcatgtcgaccgaccagtacactgacgacactaacggcgagatcgtgggatcgcttagcgagtatccc

SEQ ID NO: 2226 - protein, 53 aa, Halosimplex carlsbadense
MERDTSDYGVPELTEYGSVEAITEQQFNKDGMSTDQYTDDTNGEIVGSLSEYP

SEQ ID NO: 2227 - DNA, 189 bp, Tolypothrix campylonemoides
  CDS (1)..(189)
atgaaaaaaacttacaacgcacccaagctgacaaatcatggaagcgtagaagcaatcacccaactatatggaccggggtcaagaagggatttcctcttttttaccggtaatccgaatggcgttgcccctggtactgtcgtgagtggtaccactggttctacagacgcgaatatcgtacctcagggcagc

SEQ ID NO: 2228 - protein, 63 aa, Tolypothrix campylonemoides
MKKTYNAPKLTNHGSVEAITQLYGPGSRRDFLFFTGNPNGVAPGTVVSGTTGSTDANIVPQGS

SEQ ID NO: 2229 - DNA, 162 bp, Psychromonas ingrahamii
  CDS (1)..(162)
atgtcagataagatagaaaaaacagtgagtaattctaaaaataatactttggtagaaaataaagctgaatggcaagtgcctagcctaagcaagttagatgtaagtcagacccaaggaggaagcgttagcagtgatgaacttgcttcttctaaagtcggttcg

SEQ ID NO: 2230 - protein, 54 aa, Psychromonas ingrahamii
MSDKIEKTVSNSKNNTLVENKAEWQVPSLSKLDVSQTQGGSVSSDELASSKVGS

SEQ ID NO: 2231 - DNA, 150 bp, Mesorhizobium sp.
  CDS (1)..(150)
atggaacagaatgttgaaaagcatgaatacgagacaccaagcctgacggttcatggttcgattgagaccatcacccagggtggcggcggcaacacggcgatcgacgcatcgttccccgcgcacacgccgatcggcgacctgacgttctcc

SEQ ID NO: 2232 - protein, 50 aa, Mesorhizobium sp.
MEQNVEKHEYETPSLTVHGSIETITQGGGGNTAIDASFPAHTPIGDLTFS

SEQ ID NO: 2233 - DNA, 153 bp, Desulfocapsa sulfexigens; identical to SEQ ID NO: 2211
  CDS (1)..(153)

SEQ ID NO: 2234 - protein, 51 aa, Desulfocapsa sulfexigens; identical to SEQ ID NO: 2212

SEQ ID NO: 2235 - DNA, 150 bp, Mesorhizobium sp.; identical to SEQ ID NO: 2231
  CDS (1)..(150)

SEQ ID NO: 2236 - protein, 50 aa, Mesorhizobium sp.; identical to SEQ ID NO: 2232

SEQ ID NO: 2237 - DNA, 156 bp, Desulfobulbus japonicus
  CDS (1)..(156)
atggaaaccagagagaaagttacaaataatactgaaaagaagcagtgggcacagcctgagctgacccattatggcagcgttgaaaaaattaccctcaaaggttggggcgcacaggatggtcagggccttgagcctgccgggcatcatcctagtctg

SEQ ID NO: 2238 - protein, 52 aa, Desulfobulbus japonicus
METREKVTNNTEKKQWAQPELTHYGSVEKITLKGWGAQDGQGLEPAGHHPSL

SEQ ID NO: 2239 - DNA, 138 bp, Sphingomonas sp.
  CDS (1)..(138)
atgcccaaagctcaatatgaagcgcctgaactgatcgatgctggcctgttcgaggagatcaccgagggcggtgcaaacggctccgtcctcgacgcatccttctcggccggcacgccggtttccgatctgaccttttcc

SEQ ID NO: 2240 - protein, 46 aa, Sphingomonas sp.
MPKAQYEAPELIDAGLFEEITEGGANGSVLDASFSAGTPVSDLTFS

SEQ ID NO: 2241 - DNA, 144 bp, Salinibacter ruber
  CDS (1)..(144)
atggattaccaaactcccgagcttacaccgcatggatcggtgactgaacttaccgccactatcaatccttccaacattgatgatgtgaacgaggaaactggcgacgaaggccagggttcgttcagcgtcgttaaggaagaaggc

SEQ ID NO: 2242 - protein, 48 aa, Salinibacter ruber
MDYQTPELTPHGSVTELTATINPSNIDDVNEETGDEGQGSFSVVKEEG

SEQ ID NO: 2243 - DNA, 102 bp, Salinibacter ruber
  CDS (1)..(102)
atgccaacgctgacaatgaccactcgaattggctcccagatcagtcaaacggtgggaacggaaaaggcaccggagatggaagctaggggaagccgtagaccg

SEQ ID NO: 2244 - protein, 34 aa, Salinibacter ruber
MPTLTMTTRIGSQISQTVGTEKAPEMEARGSRRP

SEQ ID NO: 2245 - DNA, 150 bp, Mesorhizobium sp.
  CDS (1)..(150)
atggaacagaatgttgaaaagcacgagtacgaaacgccaagcctgacggtacatggttccattgaaaccatcacccagggcggtggtggcagcacggcaaccgacgcgtcgtttcccgcgcacaccccaatcggcgacctgacgttctcc

SEQ ID NO: 2246 - protein, 50 aa, Mesorhizobium sp.
MEQNVEKHEYETPSLTVHGSIETITQGGGGSTATDASFPAHTPIGDLTFS

SEQ ID NO: 2247 - DNA, 135 bp, Desulfobulbaceae bacterium
  CDS (1)..(135)
atggaaaagaaagagtatgtggcaccggttgttgtagtctatggcgatgtagaagagataacaaaagcttcctcacctactccgactcgtcttgatgcaaattataatcaaggtgcgagtggcaacatttttagt

SEQ ID NO: 2248 - protein, 45 aa, Desulfobulbaceae bacterium
MEKKEYVAPVVVVYGDVEEITKASSPTPTRLDANYNQGASGNIFS

SEQ ID NO: 2249 - DNA, 123 bp, Prevotella oryzae
  CDS (1)..(123)
atggaaaaaggaaaaaaaagacaagaaaagtggagtacgccaaaagtggaaattatctctattaaagaacagaccttaggtgctatcggcacaaattgggatcagcaggacaatactctaagt

SEQ ID NO: 2250 - protein, 41 aa, Prevotella oryzae
MEKGKKRQEKWSTPKVEIISIKEQTLGAIGTNWDQQDNTLS

SEQ ID NO: 2251 - DNA, 144 bp, Methanobacterium formicicum
  CDS (1)..(144)
atgacagataatgagaataacaaaagaaaatcatatgaaactccaaaaatcaaagtccatggaaacatcaaaaaactaactaaaggtagtgatggtgatgaagctgatggaactgcaggtggaactttatatacttaccaaggt

SEQ ID NO: 2252 - protein, 48 aa, Methanobacterium formicicum
MTDNENNKRKSYETPKIKVHGNIKKLTKGSDGDEADGTAGGTLYTYQG

SEQ ID NO: 2253 - DNA, 147 bp, Runella slithyformis
  CDS (1)..(147)
atgaaactaaatcccaaaaatgacaaaagtaacaggctgcgccggcgctatcatgcccctcagctgaaaaagtatggtccagttgcaaatattactcgtgcagattcaggaaccaacctcgatagtttagggggggacatatctgcc

SEQ ID NO: 2254 - protein, 49 aa, Runella slithyformis
MKLNPKNDKSNRLRRRYHAPQLKKYGPVANITRADSGTNLDSLGGDISA

SEQ ID NO: 2255 - DNA, 144 bp, Salinibacter ruber; identical to SEQ ID NO: 2241
  CDS (1)..(144)

SEQ ID NO: 2256 - protein, 48 aa, Salinibacter ruber; identical to SEQ ID NO: 2242

SEQ ID NO: 2257 - DNA, 102 bp, Salinibacter ruber; identical to SEQ ID NO: 2243
  CDS (1)..(102)

SEQ ID NO: 2258 - protein, 34 aa, Salinibacter ruber; identical to SEQ ID NO: 2244

SEQ ID NO: 2259 - DNA, 168 bp, Nostoc sp.
  CDS (1)..(168)
atgagtgaatctcatgaagagaatcaacctgagaaggaagataatcgtctcccttatgaaaagcctaaattacgcaagcacggcaaagtcaatgatactactttgtcagttcctacaccaggcaccaagttcgatactccttttgttggaattcctagagctatatct

SEQ ID NO: 2260 - protein, 56 aa, Nostoc sp.
MSESHEENQPEKEDNRLPYEKPKLRKHGKVNDTTLSVPTPGTKFDTPFVGIPRAIS

SEQ ID NO: 2261 - DNA, 168 bp, Nostoc sp.; identical to SEQ ID NO: 2259
  CDS (1)..(168)

SEQ ID NO: 2262 - protein, 56 aa, Nostoc sp.; identical to SEQ ID NO: 2260

SEQ ID NO: 2263 - DNA, 189 bp, Verrucomicrobia bacterium
  CDS (1)..(189)
atgaagaacgatagggaaaagcgggaactcaatcaggcggtccggcgagcgaatcggagtcggaagccctacgaggcgccaaagctgattgttcatgggtcggtcgaagagctcacgaaggctagcggcctcttgctcaccgatacgcttctgacaggaagcacggtcacgaccgtcaccgtcctcggc

SEQ ID NO: 2264 - protein, 63 aa, Verrucomicrobia bacterium
MKNDREKRELNQAVRRANRSRKPYEAPKLIVHGSVEELTKASGLLLTDTLLTGSTVTTVTVLG

SEQ ID NO: 2265 - DNA, 117 bp, Streptomyces graminilatus
  CDS (1)..(117)
atgaacgacgtctacgagccgcccacgctggtggagatcggtggcttcgcggagctgaccatggccttcgggccgtgccaggagcaggactggttcgacggtaccgcctggatctgc

SEQ ID NO: 2266 - protein, 39 aa, Streptomyces graminilatus
MNDVYEPPTLVEIGGFAELTMAFGPCQEQDWFDGTAWIC

SEQ ID NO: 2267 - DNA, 123 bp, Streptomyces flocculus; identical to SEQ ID NO: 505
  CDS (1)..(123)

SEQ ID NO: 2268 - protein, 41 aa, Streptomyces flocculus; identical to SEQ ID NO: 506

SEQ ID NO: 2269 - DNA, 150 bp, Rhodospirillum rubrum
  CDS (1)..(150)
atgaacgagcaaaagacttccgatcccgtcgagctggaagacgaaaccaagcttcccgtttggcaccggccgaccttcgccatcctcgacgtggaatcgggcacggtcacgacgtcggggcctcacgccgacggcaatggctcgacaagc

SEQ ID NO: 2270 - protein, 50 aa, Rhodospirillum rubrum
MNEQKTSDPVELEDETKLPVWHRPTFAILDVESGTVTTSGPHADGNGSTS

SEQ ID NO: 2271 - DNA, 147 bp, Betaproteobacteria bacterium
  CDS (1)..(147)
atggacggaatcccggctgcacgcgatcgcccgccctaccaaccgccgaggctggtgcgctacggtgatgcgacggcaattacgaaggctgtgtcagatacctccacaaagcccgacgggggtggcggaaagacgaacaaaacgtca

SEQ ID NO: 2272 - protein, 49 aa, Betaproteobacteria bacterium
MDGIPAARDRPPYQPPRLVRYGDATAITKAVSDTSTKPDGGGGKTNKTS

SEQ ID NO: 2273 - DNA, 138 bp, Erythrobacter atlanticus
  CDS (1)..(138)
atgactaccaagacaagtattaatacgggcaaggctcgctattctacgccgcagctgaaggaatttggctcggttcgcaaccttaccggcggtagtggcggcacaaggggcgatggccaactcggccagacgagactc

SEQ ID NO: 2274 - protein, 46 aa, Erythrobacter atlanticus
MTTKTSINTGKARYSTPQLKEFGSVRNLTGGSGGTRGDGQLGQTRL

SEQ ID NO: 2275 - DNA, 183 bp, Unknown
  Description of Unknown: Uncultured marine bacterium sequence
  CDS (1)..(183)
atgtcgggagagcagtcagtgagcagaagagaggaaaatccccagatatcgatttcagcggggtctggccgtaaatacaagacgccgcgattggagcggtttggtgagatctctcatgtcacacagggctcatttggtaagaaaaaagacgccgaaggcgacgaagtggcaattattccaaaa

SEQ ID NO: 2276 - protein, 61 aa, Unknown
  Description of Unknown: Uncultured marine bacterium sequence
MSGEQSVSRREENPQISISAGSGRKYKTPRLERFGEISHVTQGSFGKKKDAEGDEVAIIPK

SEQ ID NO: 2277 - DNA, 183 bp, Unknown; identical to SEQ ID NO: 2275
  Description of Unknown: Uncultured marine bacterium sequence
  CDS (1)..(183)

SEQ ID NO: 2278 - protein, 61 aa, Unknown; identical to SEQ ID NO: 2276
  Description of Unknown: Uncultured marine bacterium sequence

SEQ ID NO: 2279 - DNA, 138 bp, Gloeobacter kilaueensis
  CDS (1)..(138)
atgagcgagccagcgccgccggagaaaaaaccgtaccagcctccccagttgcacgtctacggcgatatccgcacgatcacccagggaacttctgatcgcaagggccgaaaagacagcaacagagtaaagacagctgtc

SEQ ID NO: 2280 - protein, 46 aa, Gloeobacter kilaueensis
MSEPAPPEKKPYQPPQLHVYGDIRTITQGTSDRKGRKDSNRVKTAV

SEQ ID NO: 2281 - DNA, 138 bp, Sphingomonas sp.
  CDS (1)..(138)
atgcccaaagccgactatgaaacccctgagctcactgaagtgggttcgttcgaggcggtgactcaggggggtgccgacggcactgttctggacgctgcattttcctctggaacgcccgtctcggatctgactttttcc

SEQ ID NO: 2282 - protein, 46 aa, Sphingomonas sp.
MPKADYETPELTEVGSFEAVTQGGADGTVLDAAFSSGTPVSDLTFS

SEQ ID NO: 2283 - DNA, 138 bp, Gloeobacter kilaueensis; identical to SEQ ID NO: 2279
  CDS (1)..(138)

SEQ ID NO: 2284 - protein, 46 aa, Gloeobacter kilaueensis; identical to SEQ ID NO: 2280

SEQ ID NO: 2285 - DNA, 141 bp, Filamentous cyanobacterium
  CDS (1)..(141)
atgaacaatcccacaaccaaaaaaccttatcaacccccccaactcaaagtttacggcgacatcaagaccattaccgccgccgtagctgttgaaggtaacgttgatggtgcggggcccgacgctgttcccaaccgcaccaac

SEQ ID NO: 2286 - protein, 47 aa, Filamentous cyanobacterium
MNNPTTKKPYQPPQLKVYGDIKTITAAVAVEGNVDGAGPDAVPNRTN

SEQ ID NO: 2287 - DNA, 144 bp, Asticcacaulis sp.
  CDS (1)..(144)
atgaccgaacaaactaaagttgcttacgtcgctccgaccgtcgaaaagatcggcgatttcgaaaccaccacccagcacacgaactccggcaccactgccgatatcgctctgggtcaaggcgacagcatcctgggtcacctgtcc

SEQ ID NO: 2288 - protein, 48 aa, Asticcacaulis sp.
MTEQTKVAYVAPTVEKIGDFETTTQHTNSGTTADIALGQGDSILGHLS

SEQ ID NO: 2289 - DNA, 129 bp, Gracilibacillus boraciitolerans; identical to SEQ ID NO: 2157
  CDS (1)..(129)

SEQ ID NO: 2290 - protein, 43 aa, Gracilibacillus boraciitolerans; identical to SEQ ID NO: 2158

SEQ ID NO: 2291 - DNA, 156 bp, Leptolyngbya sp.
  CDS (1)..(156)
atgtctcaaacgactcctaataagacaccaaaatcaggcaagcgtctataccattctcctaaattcgataaattaggtaaagtgagtgagcttacactgactagcacaacatttgtgggttcagacggtggcagtggaattttccaatatgcttca

SEQ ID NO: 2292 - protein, 52 aa, Leptolyngbya sp.
MSQTTPNKTPKSGKRLYHSPKFDKLGKVSELTLTSTTFVGSDGGSGIFQYAS

SEQ ID NO: 2293 - DNA, 150 bp, Pedobacter arcticus
  CDS (1)..(150)
atgaacaaagaagaaactactggaaactctaaaaaaaactacgctgcaccagaactgaaggaattggggaaaattggagaaattacgaataccacaagtgcagacagcactcatactcaagatggtggtggtggcccaaattactattca

SEQ ID NO: 2294 - protein, 50 aa, Pedobacter arcticus
MNKEETTGNSKKNYAAPELKELGKIGEITNTTSADSTHTQDGGGGPNYYS

SEQ ID NO: 2295 - DNA, 159 bp, Spirulina subsalsa
  CDS (1)..(159)
atgacaaaccacgccactgaaactgaactcaagccaaaacagccctattatgctcctcaagtccaatgttacggggacattaaaactctgacccaaagtgtagcgattcgcgggaatttagatggtgcagggcctcgggctgttcctaaccgaactatt

SEQ ID NO: 2296 - protein, 53 aa, Spirulina subsalsa
MTNHATETELKPKQPYYAPQVQCYGDIKTLTQSVAIRGNLDGAGPRAVPNRTI

SEQ ID NO: 2297 - DNA, 132 bp, Edaphobacter aggregans
  CDS (1)..(132)
atgcgctatatccaaccgaaaatcacaggcaggttcaacgccacgtccaccatcaagagtgcgaagatcgcaccccaatctgaagtcggcagcagcctcctgacgaacggtgctgcctatcaggcagacgag

SEQ ID NO: 2298 - protein, 44 aa, Edaphobacter aggregans
MRYIQPKITGRFNATSTIKSAKIAPQSEVGSSLLTNGAAYQADE

SEQ ID NO: 2299 - DNA, 129 bp, Sphingomonas sp.
  CDS (1)..(129)
atggtgctggcgctgcgcccctggacgacgccccggatcgtgtatcaggcgcaagccgccgaagacacgctggccgacaccgcacagccgccgaacgacttgtcgggatcgcccgctttcctcgcgtcg

SEQ ID NO: 2300 - protein, 43 aa, Sphingomonas sp.
MVLALRPWTTPRIVYQAQAAEDTLADTAQPPNDLSGSPAFLAS

SEQ ID NO: 2301 - DNA, 126 bp, Erythrobacter longus
  CDS (1)..(126)
atgattaagacttttgaaaaagcgaagtatgaggctccgaagctgaccgtatttggttcggttcgtaacctcaccggcggaagccagacccgtttccgtgatggtgcggcgtctaactcacgcttc

SEQ ID NO: 2302 - protein, 42 aa, Erythrobacter longus
MIKTFEKAKYEAPKLTVFGSVRNLTGGSQTRFRDGAASNSRF

SEQ ID NO: 2303 - DNA, 165 bp, Verrucomicrobium sp.
  CDS (1)..(165)
atgacacaaagagatgaccagcataatgctacaggtagctactcccccgtttccaaacaggcctacgagacgccgaagctgaccccgtccggccgaatggccgaggtcacgcaaaaatcagaccgtgtcccggatggaaagagtgggctgcgcggtaatcactca

SEQ ID NO: 2304 - protein, 55 aa, Verrucomicrobium sp.
MTQRDDQHNATGSYSPVSKQAYETPKLTPSGRMAEVTQKSDRVPDGKSGLRGNHS

SEQ ID NO: 2305 - DNA, 171 bp, Marinomonas mediterranea
  CDS (1)..(171)
atgagcgatattgatgttaatacactgttaagtgaagataaaaactcgaaaaaaagtttgggagataagctcatttgggttgctccggtcttagaagagcttgagactgataaaacgagatctgggggcggtacagctactgaaactccgtttaatcccggagtgtcaagc

SEQ ID NO: 2306 - protein, 57 aa, Marinomonas mediterranea
MSDIDVNTLLSEDKNSKKSLGDKLIWVAPVLEELETDKTRSGGGTATETPFNPGVSS

SEQ ID NO: 2307 - DNA, 177 bp, Chloracidobacterium thermophilum
  CDS (1)..(177)
atgaaacagccattaccctcaattgaacaacaagcttctttatcgcaagtcaagcagcccggcaaaaagacgtaccactcgccaacctttacaggttacggctcactcactgactttacccgagcttcaggcaacggtgggactcctgacagcatcttaatgcgtaatgcctcaagg

SEQ ID NO: 2308 - protein, 59 aa, Chloracidobacterium thermophilum
MKQPLPSIEQQASLSQVKQPGKKTYHSPTFTGYGSLTDFTRASGNGGTPDSILMRNASR

SEQ ID NO: 2309 - DNA, 111 bp, Sanguibacter sp.
  CDS (1)..(111)
atggagaaggcataccaggcaccgagcatcgtcgccgcaggcgacttcacagagctcacgcaggccgtgcgagacggcggggtcgtcgacttcgtcggcggatggtggttc

SEQ ID NO: 2310 - protein, 37 aa, Sanguibacter sp.
MEKAYQAPSIVAAGDFTELTQAVRDGGVVDFVGGWWF

SEQ ID NO: 2311 - DNA, 102 bp, Streptomyces sp.
  CDS (1)..(102)
atggtggaggtcggtgacttcgccgatctgacgcgcggcgaggccatcggggcgcagtacgagggtggattccctccctatgagtggtacttgggccccagc

SEQ ID NO: 2312 - protein, 34 aa, Streptomyces sp.
MVEVGDFADLTRGEAIGAQYEGGFPPYEWYLGPS

SEQ ID NO: 2313 - DNA, 102 bp, Streptomyces kanamyceticus
  CDS (1)..(102)
atggtggaggtcggcgacttcgccgagctgacgcgcggtgagccgctgggggcgttctacgaaggcgggttcccgccctacgagtggtacctcggccccagc

SEQ ID NO: 2314 - protein, 34 aa, Streptomyces kanamyceticus
MVEVGDFAELTRGEPLGAFYEGGFPPYEWYLGPS

SEQ ID NO: 2315 - DNA, 102 bp, Streptomyces phaeochromogenes
  CDS (1)..(102)
atggtggaagtcggtgacttcgccgagctgacccgcggcgaggccctgggcgcgcactacgagggcggattcccgccctatgagtggtacctcggccccaac

SEQ ID NO: 2316 - protein, 34 aa, Streptomyces phaeochromogenes
MVEVGDFAELTRGEALGAHYEGGFPPYEWYLGPN

SEQ ID NO: 2317 - DNA, 105 bp, Streptomyces alboniger
  CDS (1)..(105)
atgacgtacgagcgtcccactctcaccaaggccggaagcttccgtaaggtgaccgggatcaaggaccacgggcccaaggacgtcctcggcggcaagcagctcctc

SEQ ID NO: 2318 - protein, 35 aa, Streptomyces alboniger
MTYERPTLTKAGSFRKVTGIKDHGPKDVLGGKQLL

SEQ ID NO: 2319 - DNA, 204 bp, Streptomyces sp.
  CDS (1)..(204)
atggcggacctccaagcggctcgatccgtggcccccggctccggcgagccggtgcagaagccggtgcacgagccgacgccgacgcgcgagccggtctacgagcctccggcgctggtcgaggtcgggagcttctccgccctgacactcggctggttcgaaggaaacgtcctcgaggagggcggcgaagggctgcggtggtggagg

SEQ ID NO: 2320 - protein, 68 aa, Streptomyces sp.
MADLQAARSVAPGSGEPVQKPVHEPTPTREPVYEPPALVEVGSFSALTLGWFEGNVLEEGGEGLRWWR

SEQ ID NO: 2321 - DNA, 150 bp, Streptomyces aurantiacus
  CDS (1)..(150)
atggaggtgatcaccgtgcaggagacgctgcagggctttgagaccacggatgtgtacgagccgccgctgctggcggaggtcgggcagtacgccgagctgacccagggcgagttcggggactggcccgactacccggtcggcctctggctc

SEQ ID NO: 2322 - protein, 50 aa, Streptomyces aurantiacus
MEVITVQETLQGFETTDVYEPPLLAEVGQYAELTQGEFGDWPDYPVGLWL

SEQ ID NO: 2323 - DNA, 123 bp, Streptomyces luridiscabiei; identical to SEQ ID NO: 303
  CDS (1)..(123)

SEQ ID NO: 2324 - protein, 41 aa, Streptomyces luridiscabiei; identical to SEQ ID NO: 304

SEQ ID NO: 2325 - DNA, 108 bp, Streptomyces atriruber
  CDS (1)..(108)
atgaagaaggcctacgaagcgccggcgctcgtccggctcgggacattccggaagaagaccgggctgctgcagcggtccggaaacgaccggctcatcctgagtaagaac

SEQ ID NO: 2326 - protein, 36 aa, Streptomyces atriruber
MKKAYEAPALVRLGTFRKKTGLLQRSGNDRLILSKN

SEQ ID NO: 2327 - DNA, 108 bp, Streptomyces sp.
  CDS (1)..(108)
atgaagaaggcatacgaggctccgacgctcgtccgactcggcagcttccggaaggagaccgggctcctgggacgctccggcaacgaccggctgatcctgagcaagaac

SEQ ID NO: 2328 - protein, 36 aa, Streptomyces sp.
MKKAYEAPTLVRLGSFRKETGLLGRSGNDRLILSKN

SEQ ID NO: 2329 - DNA, 108 bp, Streptomyces torulosus
  CDS (1)..(108)
atgaagaaggcttacgaggcaccgacgctcgtccgactcggcacgttccggaaggagacggggctcctggggcgctccggcaacgaccggctgatcctgagcaagaac

SEQ ID NO: 2330 - protein, 36 aa, Streptomyces torulosus
MKKAYEAPTLVRLGTFRKETGLLGRSGNDRLILSKN

SEQ ID NO: 2331 - DNA, 108 bp, Streptomyces alboniger
  CDS (1)..(108)
atgaagaaggcctacgaagcgccggcgctcatccgactcgggacgttccggaagaagaccgggctgctggcgcggaacggaaacgaccgactcattttcagcaagaac

SEQ ID NO: 2332 - protein, 36 aa, Streptomyces alboniger
MKKAYEAPALIRLGTFRKKTGLLARNGNDRLIFSKN

SEQ ID NO: 2333 - DNA, 120 bp, Lactococcus garvieae; identical to SEQ ID NO: 1549
  CDS (1)..(120)

SEQ ID NO: 2334 - protein, 40 aa, Lactococcus garvieae; identical to SEQ ID NO: 1550

SEQ ID NO: 2335 - DNA, 126 bp, Lactococcus garvieae; identical to SEQ ID NO: 1551
  CDS (1)..(126)

SEQ ID NO: 2336 - protein, 42 aa, Lactococcus garvieae; identical to SEQ ID NO: 1552

SEQ ID NO: 2337 - DNA, 177 bp, Streptomyces aureus
  CDS (1)..(177)
atgaactctgcacaccagcaccgcgaccccgcacacgagaacgcccccgccggcgcggcggacgggcgcgaccccgaactgctcctcgtcgacgccggatcggtgcgtgacgtcaccctggggaactggtcgcacggccaccccgacgacacgcagcactggacaccgatcgacgac

SEQ ID NO: 2338 - protein, 59 aa, Streptomyces aureus
MNSAHQHRDPAHENAPAGAADGRDPELLLVDAGSVRDVTLGNWSHGHPDDTQHWTPIDD

SEQ ID NO: 2339 - DNA, 111 bp, Streptomyces rimosus
  CDS (1)..(111)
atgcgtctgcgttacacgcctccgaaggtcgtccgtatcggacgggtcgagaagctgaccggtcagctgcgccacggcactcctgacctgctcggccacggaaacatctgg

SEQ ID NO: 2340 - protein, 37 aa, Streptomyces rimosus
MRLRYTPPKVVRIGRVEKLTGQLRHGTPDLLGHGNIW

SEQ ID NO: 2341 - DNA, 156 bp, Frankia saprophytica
  CDS (1)..(156)
atgactaccgttgagcacgtgcccgctgtggcgccagctgagcaccggccctacgagaagcccgcgctggtctgccacggcagcctggcgatgcggaccgccggtgggcttggcctcaactttgacggggcgctgcccctcgatttcaccagcggc

SEQ ID NO: 2342 - protein, 52 aa, Frankia saprophytica
MTTVEHVPAVAPAEHRPYEKPALVCHGSLAMRTAGGLGLNFDGALPLDFTSG

SEQ ID NO: 2343 - DNA, 165 bp, Mastigocoleus testarum
  CDS (1)..(165)
atgaagaaacagtacaaaaagccaacattatctacccacggaaatgtcgaatcaattactcaagtattaggtaatgataagattgaagattttctcatttttaacggtactgttgtaggcactagtgatgattcaattgactttgactctgataagcataagcct

SEQ ID NO: 2344 - protein, 55 aa, Mastigocoleus testarum
MKKQYKKPTLSTHGNVESITQVLGNDKIEDFLIFNGTVVGTSDDSIDFDSDKHKP

SEQ ID NO: 2345 - DNA, 141 bp, Clostridium butyricum
ttgaaaaaatggattgaaccagaaattcaaaatttagcattaaaggatacaaagggtggtccaaagtatgatcctaaagtagatggtgatgctatatatgacgaaaactcaaataagtggtggcaagctataggaaaatct

SEQ ID NO: 2346 - protein, 47 aa, Clostridium butyricum
MKKWIEPEIQNLALKDTKGGPKYDPKVDGDAIYDENSNKWWQAIGKS

SEQ ID NO: 2347 - DNA, 180 bp, Lamprocystis purpurea
  CDS (1)..(180)
atgaccagcgatcctgaaaccccggccgagcaacgtccgctccgcgcagatcgccccgaggccgctcgtctaccctacgacccggcgcgtcttgtccatctgggctcattcagagaactgaccaaggggggtggactgactggtgacgacattggcgcacccttcgggacccggcccgga

SEQ ID NO: 2348 - protein, 60 aa, Lamprocystis purpurea
MTSDPETPAEQRPLRADRPEAARLPYDPARLVHLGSFRELTKGGGLTGDDIGAPFGTRPG

SEQ ID NO: 2349 - DNA, 150 bp, Salinarimonas rosea
  CDS (1)..(150)
atgaaccagcacgacgagaagctcgcgtacgtggctccggagctcgaggttctcggcacgctcgaggatctgacccacggtaccacgtcgggcacggtcaccgacgccgacttctccgcggggacgccgatccccgatctcaccttctcg

SEQ ID NO: 2350 - protein, 50 aa, Salinarimonas rosea
MNQHDEKLAYVAPELEVLGTLEDLTHGTTSGTVTDADFSAGTPIPDLTFS

SEQ ID NO: 2351 - DNA, 108 bp, Brevundimonas nasdae
  CDS (1)..(108)
atgacgtcgctgggttcgttcgaaaccctgacgcaaggcgcctcgcgcggttcgcagctcgacgcgaccttcccgaccggcaccccgttcggcgagctgaccttctcc

SEQ ID NO: 2352 - protein, 36 aa, Brevundimonas nasdae
MTSLGSFETLTQGASRGSQLDATFPTGTPFGELTFS

SEQ ID NO: 2353 - DNA, 108 bp, Streptomyces viridochromogenes
  CDS (1)..(108)
atgctgaggtacgcgaccccgactgtggtccgactaggacggatcgaggaactcaccgggcagctgcgccgcggcgttcccgacctcctcggtcacggcaacatcctg

SEQ ID NO: 2354 - protein, 36 aa, Streptomyces viridochromogenes
MLRYATPTVVRLGRIEELTGQLRRGVPDLLGHGNIL

SEQ ID NO: 2355 - DNA, 174 bp, Sulfurovum sp.
  CDS (1)..(174)
atgaaaaaaaactttagtataaaaaaatataataaaccggaaataaaaaatttagggaaaattggaactaaaacccaatataataaatcgacagcaggtgccgatggtacaagtagcacacattataataaggggcaagataccgggtttggtggtgctggtacagttactcct

SEQ ID NO: 2356 - protein, 58 aa, Sulfurovum sp.
MKKNFSIKKYNKPEIKNLGKIGTKTQYNKSTAGADGTSSTHYNKGQDTGFGGAGTVTP

SEQ ID NO: 2357 - DNA, 138 bp, Sphingomonas sp.
  CDS (1)..(138)
atgcccaaaactgaatatgagacacccgaactgatcgacgcgggcctgttcgaggagatcaccgaaggcggagcaagcggctcggtcctcgatgccaccttctctgcaggaaccccggtctccgacctgaccttttcc

SEQ ID NO: 2358 - protein, 46 aa, Sphingomonas sp.
MPKTEYETPELIDAGLFEEITEGGASGSVLDATFSAGTPVSDLTFS

SEQ ID NO: 2359 - DNA, 135 bp, Leadbetterella byssophila
  CDS (1)..(135)
atggaacctgtagtaaaaaagaggtacacgaaacctgtattattgaagcatggaatgcttaggaaattgactctaaaatcgggaagtgcagtagatttcactgagccatctagttctgattggggaggggaagat

SEQ ID NO: 2360 - protein, 45 aa, Leadbetterella byssophila
MEPVVKKRYTKPVLLKHGMLRKLTLKSGSAVDFTEPSSSDWGGED

SEQ ID NO: 2361 - DNA, 81 bp, Rhodobacter sphaeroides; identical to SEQ ID NO: 881
  CDS (1)..(81)

SEQ ID NO: 2362 - protein, 27 aa, Rhodobacter sphaeroides
MTHGATDGWALDASFPVDTPKGDLTFS

SEQ ID NO: 2363 - DNA, 126 bp, Streptococcus pneumoniae; identical to SEQ ID NO: 1563
  CDS (1)..(126)

SEQ ID NO: 2364 - protein, 42 aa, Streptococcus pneumoniae; identical to SEQ ID NO: 1564

SEQ ID NO: 2365 - DNA, 81 bp, Rhodobacter sphaeroides; identical to SEQ ID NO: 881
  CDS (1)..(81)

SEQ ID NO: 2366 - protein, 27 aa, Rhodobacter sphaeroides
MTHGATDGWALDASFPVDTPKGDLTFS

SEQ ID NO: 2367 - DNA, 108 bp, Alistipes sp.
  CDS (1)..(108)
atgaacgaaaaagaaaaatggagttcacctgaagttgaggttatctctattagttcagagactttaggaacgggaactaataatcaagaagctgatagctccaattcc

SEQ ID NO: 2368 - protein, 36 aa, Alistipes sp.
MNEKEKWSSPEVEVISISSETLGTGTNNQEADSSNS

SEQ ID NO: 2369 - DNA, 126 bp, Paenibacillus polymyxa
  CDS (1)..(126)
atgagtaaaaaagaatggcaggaaccgacgattgaggtgctggatattaaccacactatggcgggtaaaggctggaaacagattgattgggtgtcagaccatgatgccgatctgtataatccgagc

SEQ ID NO: 2370 - protein, 42 aa, Paenibacillus polymyxa
MSKKEWQEPTIEVLDINHTMAGKGWKQIDWVSDHDADLYNPS

SEQ ID NO: 2371 - DNA, 138 bp, Streptomyces megasporus; identical to SEQ ID NO: 839
  CDS (1)..(138)

SEQ ID NO: 2372 - protein, 46 aa, Streptomyces megasporus; identical to SEQ ID NO: 840

SEQ ID NO: 2373 - DNA, 168 bp, Rhodobacter sphaeroides
  CDS (1)..(168)
atgctgaggatatttgacgtggcaaacaacatccaaactcttgcttatcaggccccggtgctgcgcgctcacggcacgctggaagccatgacccacggtgcaagcacggggcatgtgaccgatgcggccttcccgtcgggcactgcgatcgccgacatgaccttctcc

SEQ ID NO: 2374 - protein, 56 aa, Rhodobacter sphaeroides
MLRIFDVANNIQTLAYQAPVLRAHGTLEAMTHGASTGHVTDAAFPSGTAIADMTFS

SEQ ID NO: 2375 - DNA, 150 bp, Mesorhizobium sp.; identical to SEQ ID NO: 2231
  CDS (1)..(150)

SEQ ID NO: 2376 - protein, 50 aa, Mesorhizobium sp.; identical to SEQ ID NO: 2232

SEQ ID NO: 2377 - DNA, 126 bp, Sphingopyxis sp.
  CDS (1)..(126)
atgaaccacgaacagaatgatggtctcatcgatctcggcgccgtcaccgaggaaaccaaggggcccggcccgcagggcttcgataccctcggtccgcagcaattgcgcggcggcatttccgacgag

SEQ ID NO: 2378 - protein, 42 aa, Sphingopyxis sp.
MNHEQNDGLIDLGAVTEETKGPGPQGFDTLGPQQLRGGISDE

SEQ ID NO: 2379 - DNA, 126 bp, Sphingopyxis sp.; identical to SEQ ID NO: 2377
  CDS (1)..(126)

SEQ ID NO: 2380 - protein, 42 aa, Sphingopyxis sp.; identical to SEQ ID NO: 2378

SEQ ID NO: 2381 - DNA, 111 bp, Klebsiella variicola; identical to SEQ ID NO: 833
  CDS (1)..(111)

SEQ ID NO: 2382 - protein, 37 aa, Klebsiella variicola; identical to SEQ ID NO: 834

SEQ ID NO: 2383 - DNA, 144 bp, Bradyrhizobium sp.
  CDS (1)..(144)
atgaatacaaccgctatcaatgacacccttatcaaggacacggtgcaggacctcggggacgctaccgagctcacaaaaggctttgggggctctaggcgcgcagaacacaccacgggcgattattattacatggatgattccgat

SEQ ID NO: 2384 - protein, 48 aa, Bradyrhizobium sp.
MNTTAINDTLIKDTVQDLGDATELTKGFGGSRRAEHTTGDYYYMDDSD

SEQ ID NO: 2385 - DNA, 135 bp, Bacillus circulans
  CDS (1)..(135)
atgaacaagcttgaatggaaagagccaaacttagaagttttagatgtaaaagaaacaatggcaggaccatttaataacaataagttagatgcaacttatgaaactggaacgccattccctgatcttggctggagc

SEQ ID NO: 2386 - protein, 45 aa, Bacillus circulans
MNKLEWKEPNLEVLDVKETMAGPFNNNKLDATYETGTPFPDLGWS

SEQ ID NO: 2387 - DNA, 261 bp, Streptomyces sp.
gtggccccggctgcgcgcggggctccggatcgcagcgcttctggacgcccgctgaccacacgcagccccggagccgaacgattggtcccggtggcaagccatccatcacccaacagaaggaagctcgtcgtgaacacacctcaggacgccaaggacaccgacgagaacgaactgctccctgtcgacaccggtgatgccaccgtgctcaccgaaggtcagggcggcggccacagcgaggacaagcgtcgcgcctacaacagc

SEQ ID NO: 2388 - protein, 87 aa, Streptomyces sp.
MAPAARGAPDRSASGRPLTTRSPGAERLVPVASHPSPNRRKLVVNTPQDAKDTDENELLPVDTGDATVLTEGQGGGHSEDKRRAYNS

SEQ ID NO: 2389 - DNA, 129 bp, Amycolatopsis sp.
  CDS (1)..(129)
atgacggagccacccacggatgaggcgggctacgagccgcctttgctcttcgacctcgggcacgtgcgggagctgaccctgggcagctcctccagcggcagtgccgactccaattcacagtattactgg

SEQ ID NO: 2390 - protein, 43 aa, Amycolatopsis sp.
MTEPPTDEAGYEPPLLFDLGHVRELTLGSSSSGSADSNSQYYW

SEQ ID NO: 2391 - DNA, 90 bp, Streptomyces xiamenensis
  CDS (1)..(90)
atggtcgttgacctcggcgacctggtcgccctgaccctcggccagggcaagggcagcagcgaggacaagcgtcgcgcctacaaccaccac

SEQ ID NO: 2392 - protein, 30 aa, Streptomyces xiamenensis
MVVDLGDLVALTLGQGKGSSEDKRRAYNHH

SEQ ID NO: 2393 - DNA, 141 bp, Haloglycomyces albus
  CDS (1)..(141)
atgaaacgtcagaaacacagcaacgtcaataccaccgtccagcggtatgagacaccgcgattgatgccggtcggttcactcgttgatgtcgtccttggcgaccagttccaagacaccaacgagggtcgtcgcaactactac

SEQ ID NO: 2394 - protein, 47 aa, Haloglycomyces albus
MKRQKHSNVNTTVQRYETPRLMPVGSLVDVVLGDQFQDTNEGRRNYY

SEQ ID NO: 2395 - DNA, 90 bp, Streptomyces xiamenensis; identical to SEQ ID NO: 2391
  CDS (1)..(90)

SEQ ID NO: 2396 - protein, 30 aa, Streptomyces xiamenensis; identical to SEQ ID NO: 2392

SEQ ID NO: 2397 - DNA, 168 bp, Streptomyces clavuligerus
gtgccgcggacacgcagtccgcggcaccgggaaccgacagttccactccgctcctcgcgctgcctgagtccttccccatcgagggatcgaccctcgggcgtctgccgatcgaccctcgggcgtctgccgaacgacgacgcggacaagtcaggcgccatgtacttcacg

SEQ ID NO: 2398 - protein, 56 aa, Streptomyces clavuligerus
MPRTRSPRHREPTVPLRSSRCLSPSPSRDRPSGVCRSTLGRLPNDDADKSGAMYFT

SEQ ID NO: 2399 - DNA, 138 bp, Streptomyces sp.
  CDS (1)..(138)
atgatcgacacctgcaacgagaacagcgacaccgctcccgagaagaaatcggtggcggtcgaccttggcgatgtcgctgagctgaccgagggccaaggcggcggacagtcggaggacaagcgccgcgcgtacaactgc

SEQ ID NO: 2400 - protein, 46 aa, Streptomyces sp.
MIDTCNENSDTAPEKKSVAVDLGDVAELTEGQGGGQSEDKRRAYNC

SEQ ID NO: 2401 - DNA, 141 bp, Rubidibacter lacunae; identical to SEQ ID NO: 1541
  CDS (1)..(141)

SEQ ID NO: 2402 - protein, 47 aa, Rubidibacter lacunae; identical to SEQ ID NO: 1542

SEQ ID NO: 2403 - DNA, 132 bp, Stackebrandtia nassauensis
  CDS (1)..(132)
atgaacaccaagaaaacgcccgcgcggcgcacccgttacgcccgcccgaccgtgacgctgctgggcgacgcggtgaagctgaccaacggcgggcagtacaacgacactcacgacagccgccagtactactac

SEQ ID NO: 2404 - protein, 44 aa, Stackebrandtia nassauensis
MNTKKTPARRTRYARPTVTLLGDAVKLTNGGQYNDTHDSRQYYY

SEQ ID NO: 2405 - DNA, 132 bp, Streptomyces baarnensis
  CDS (1)..(132)
atgaacccacttcagatcgcggagaacaccgacgagaacgacctgctccctgtcgagatcggtgaagcgaccgtgctcaccgagggtcagggcggcggccagagcgaagacaagcgccgcgcctacaacagc

SEQ ID NO: 2406 - protein, 44 aa, Streptomyces baarnensis
MNPLQIAENTDENDLLPVEIGEATVLTEGQGGGQSEDKRRAYNS

SEQ ID NO: 2407 - DNA, 132 bp, Stackebrandtia nassauensis; identical to SEQ ID NO: 2403
  CDS (1)..(132)

SEQ ID NO: 2408 - protein, 44 aa, Stackebrandtia nassauensis; identical to SEQ ID NO: 2404

SEQ ID NO: 2409 - DNA, 135 bp, Nocardiopsis halotolerans
gtgtccgagaacgacaacaccccccagcccgtggcctatgagcccccgaccctgaccgacctcggtgacgcccgcgcgctcacgctcggctccgcccagaacgacaccgctgacctgaaccaggcccgctacaac

SEQ ID NO: 2410 - protein, 45 aa, Nocardiopsis halotolerans
MSENDNTPQPVAYEPPTLTDLGDARALTLGSAQNDTADLNQARYN

SEQ ID NO: 2411 - DNA, 108 bp, Shimazuella kribbensis
  CDS (1)..(108)
atggaaaaagattatcaagcaccagaacttatagaaattggtacattcgaagaaatgactttaggatcaaagtatgatgacactgctgacaaaaatgcacatcgttat

SEQ ID NO: 2412 - protein, 36 aa, Shimazuella kribbensis
MEKDYQAPELIEIGTFEEMTLGSKYDDTADKNAHRY

SEQ ID NO: 2413 - DNA, 111 bp, Nocardiopsis kunsanensis
  CDS (1)..(111)
atggaagagccgccagaggaaacaccgaccgtgatcgatctcggtgacgcggctgccctgacccaaggcagcgacgaccagagcgtcgagagcaagcagtcaccctatgac

SEQ ID NO: 2414 - protein, 37 aa, Nocardiopsis kunsanensis
MEEPPEETPTVIDLGDAAALTQGSDDQSVESKQSPYD

SEQ ID NO: 2415 - DNA, 243 bp, Nocardiopsis sp.
gtgtattccgcttctcatcgcttcagcctctccctagcctcagaacctggaagcaccagtacggaatccggctggtgcggtcgagaagaactccatccgagcgaggaggaccgcgtggttcccagcgaagaacacgccccggtgacccctgagccccagaccgagatcgacctgggcgatgtggccgaactgaccgaagggatcggcaagtccagttccgaggccaagcgccagccctacaac

SEQ ID NO: 2416 - protein, 81 aa, Nocardiopsis sp.
MYSASHRFSLSLASEPGSTSTESGWCGREELHPSEEDRVVPSEEHAPVTPEPQTEIDLGDVAELTEGIGKSSSEAKRQPYN

SEQ ID NO: 2417 - DNA, 129 bp, Streptomyces venezuelae
  CDS (1)..(129)
atgaccgatctgccgcgtacggaggaggccccggccggggcggaggtgctcgacatcggtgacgccgccgagctgacccagggccagggcggcggccagagcgaggacaagcggcgggcctacaactgc

SEQ ID NO: 2418 - protein, 43 aa, Streptomyces venezuelae
MTDLPRTEEAPAGAEVLDIGDAAELTQGQGGGQSEDKRRAYNC

SEQ ID NO: 2419 - DNA, 129 bp, Streptomyces sp.; identical to SEQ ID NO: 1763
  CDS (1)..(129)

SEQ ID NO: 2420 - protein, 43 aa, Streptomyces sp.; identical to SEQ ID NO: 1764

SEQ ID NO: 2421 - DNA, 144 bp, Lechevalieria aerocolonigenes
  CDS (1)..(144)
atgtcggccggtacttggaccccgagcgggtctgttagcaacgagaagtacgagaagccctcgatcaccgaggctggtggggttgtcgccttgaccaacgggtctggcgcggacgacaccgccgacatgaacaagtactactac

SEQ ID NO: 2422 - protein, 48 aa, Lechevalieria aerocolonigenes
MSAGTWTPSGSVSNEKYEKPSITEAGGVVALTNGSGADDTADMNKYYY

SEQ ID NO: 2423 - DNA, 132 bp, Streptomyces avicenniae
  CDS (1)..(132)
atggagcagcagaccgccgaggtctacgccccgcccctcgtgctggacgccggtgatgtcaccgaggtgacgttggggtcgaacaacttcgacaccgcggacgacacccagtacgtcaagtccgaggacgac

SEQ ID NO: 2424 - protein, 44 aa, Streptomyces avicenniae
MEQQTAEVYAPPLVLDAGDVTEVTLGSNNFDTADDTQYVKSEDD

SEQ ID NO: 2425 - DNA, 120 bp, Streptomyces bicolor
  CDS (1)..(120)
atgcagcaggaacagcactccagcagcctccccgtgctgcacacggaggacgtcgacgcggtgaccctcggccgcgacatggagggataccgcgaaggcgcgctggagtgggtccgcatc

SEQ ID NO: 2426 - protein, 40 aa, Streptomyces bicolor
MQQEQHSSSLPVLHTEDVDAVTLGRDMEGYREGALEWVRI

SEQ ID NO: 2427 - DNA, 150 bp, Streptomyces bicolor
gtgaacgccaccatcacccagaccgccccggacaccgcggccaccgtggccaccgcgcagctgcccgtcctggcgtcggccgacgtcgacgaggtcaccctcggccgccaggccttcaacgactccgacaagtcgaactacttcgagggc

SEQ ID NO: 2428 - protein, 50 aa, Streptomyces bicolor
MNATITQTAPDTAATVATAQLPVLASADVDEVTLGRQAFNDSDKSNYFEG

SEQ ID NO: 2429 - DNA, 165 bp, Streptomyces aurantiacus
  CDS (1)..(165)
atggccgagcagaccaccgtcaccaccaagtccgccgcgtccaagcccagcaccgcgccgagcggcggcggtttcgcgccgcagatcagcgcccacccggtggccaccctcacccagggccgccagacgttcaacgactcggacaaggacaactacttcgagggc

SEQ ID NO: 2430 - protein, 55 aa, Streptomyces aurantiacus
MAEQTTVTTKSAASKPSTAPSGGGFAPQISAHPVATLTQGRQTFNDSDKDNYFEG

SEQ ID NO: 2431 - DNA, 132 bp, Promicromonospora kroppenstedtii
  CDS (1)..(132)
atggagagcgacgcgatcacgacggcggccgagcccacggagcaggaagtgactgacctcggcggcatcgtcacgctcacagagggcagcaagaagaaggccggcacagaggacaagcggtacgcctaccgc

SEQ ID NO: 2432 - protein, 44 aa, Promicromonospora kroppenstedtii
MESDAITTAAEPTEQEVTDLGGIVTLTEGSKKKAGTEDKRYAYR

SEQ ID NO: 2433 - DNA, 168 bp, Streptomyces albus
  CDS (1)..(168)
atggccgagcagaccatcgtcaccaccaagcccaccgtcgaggacacccccgccgcagcgccgagcacgggcggcttcgcgccgcagatcagcacccacccggtggccaccctcaccctgggccgccagacgttcaacgactcggacaagtcgaactacttcgaaggc

SEQ ID NO: 2434 - protein, 56 aa, Streptomyces albus
MAEQTIVTTKPTVEDTPAAAPSTGGFAPQISTHPVATLTLGRQTFNDSDKSNYFEG

SEQ ID NO: 2435 - DNA, 138 bp, Nocardia sp.
  CDS (1)..(138)
atgaggaagaccacccggttccacgtcgtggacgtggactacgaaccgcctgtgctcgaaacgccgggccacgtccggcgaatcacgctgggcagttcgccgagcggcaacgccgacgcgaactcgcagtactactgg

SEQ ID NO: 2436 - protein, 46 aa, Nocardia sp.
MRKTTRFHVVDVDYEPPVLETPGHVRRITLGSSPSGNADANSQYYW

SEQ ID NO: 2437 - DNA, 141 bp, Novosphingobium sp.
  CDS (1)..(141)
atgacccgtgaaatcgaacagcgtgacgaacatctcaccgacctcggtgcagtcaccgctgaaaccaagggccagggcggcgtccagcttccggacgtcgagaccgggctgcgctacaatatcgccggcctcagcgacgat

SEQ ID NO: 2438 - protein, 47 aa, Novosphingobium sp.
MTREIEQRDEHLTDLGAVTAETKGQGGVQLPDVETGLRYNIAGLSDD

SEQ ID NO: 2439 - DNA, 153 bp, Streptomyces sp.
  CDS (1)..(153)
atggccatcaacgccaccaccccgatcaacgagcaggctgacgagaaggtcgcccagggcttcgccccgcacgtcgctgcccacgacgtggacgaggtgaccctcggccggcaggacttcaacgactcggacaagaccaactacttcgagggc

SEQ ID NO: 2440 - protein, 51 aa, Streptomyces sp.
MAINATTPINEQADEKVAQGFAPHVAAHDVDEVTLGRQDFNDSDKTNYFEG

SEQ ID NO: 2441 - DNA, 168 bp, Streptomyces albus; identical to SEQ ID NO: 2433
  CDS (1)..(168)

SEQ ID NO: 2442 - protein, 56 aa, Streptomyces albus; identical to SEQ ID NO: 2434

SEQ ID NO: 2443 - DNA, 144 bp, Lechevalieria aerocolonigenes; identical to SEQ ID NO: 2421
  CDS (1)..(144)

SEQ ID NO: 2444 - protein, 48 aa, Lechevalieria aerocolonigenes; identical to SEQ ID NO: 2422

SEQ ID NO: 2445 - DNA, 117 bp, Actinoalloteichus spitiensis
  CDS (1)..(117)
atggaccagatccaacccgagcaggttccggacgagctgttcgtcctgggagacgtggtcgacctcaccgagggtgagggcttcgatcggtcggagaacaagcgcaacatctacaac

SEQ ID NO: 2446 - protein, 39 aa, Actinoalloteichus spitiensis
MDQIQPEQVPDELFVLGDVVDLTEGEGFDRSENKRNIYN

SEQ ID NO: 2447 - DNA, 105 bp, Rothia dentocariosa; identical to SEQ ID NO: 1625
  CDS (1)..(105)

SEQ ID NO: 2448 - protein, 35 aa, Rothia dentocariosa; identical to SEQ ID NO: 1626

SEQ ID NO: 2449 - DNA, 96 bp, Rothia dentocariosa; identical to SEQ ID NO: 1627
  CDS (1)..(96)

SEQ ID NO: 2450 - protein, 32 aa, Rothia dentocariosa; identical to SEQ ID NO: 1628

SEQ ID NO: 2451 - DNA, 123 bp, Streptomyces sp.
  CDS (1)..(123)
atggacgcgaacaccaccccggtctacaccgcgcctctcgtgctggacggcggcgacgtcgtcaaggtgacgctgggcaccaacaacttcgacaccgccgacgacacccagtacaagaacgcc

SEQ ID NO: 2452 - protein, 41 aa, Streptomyces sp.
MDANTTPVYTAPLVLDGGDVVKVTLGTNNFDTADDTQYKNA

SEQ ID NO: 2453 - DNA, 90 bp, Streptomyces sp.
  CDS (1)..(90)
atgccgctgctgcacaccgagccggtcgacgaggtgaccctgggccgcgggacggagacccgcgaggccacccacacctacgacatggtc

SEQ ID NO: 2454 - protein, 30 aa, Streptomyces sp.
MPLLHTEPVDEVTLGRGTETREATHTYDMV

SEQ ID NO: 2455 - DNA, 126 bp, Streptomyces sp.
  CDS (1)..(126)
atgcagaacatcgccatcgagaccaccgctcccgaggttccggcgctggtcatcgagccggtggacgagatcaccctcggccgccagagcttcaacgactcggacaagtcgaactacttcgagaac

SEQ ID NO: 2456 - protein, 42 aa, Streptomyces sp.
MQNIAIETTAPEVPALVIEPVDEITLGRQSFNDSDKSNYFEN

SEQ ID NO: 2457 - DNA, 255 bp, Streptomyces sp.
  CDS (1)..(255)
atgggggtaccgcgagggtaccggcaactccttttccgtggtcgctggttggcgtgtactggcgatgtcgggacgccaccggggcggaccgccgaacacgaggagggtcccgtgtcccaccccaccagcactccgcttaccggcatcaccacgaccggggaggcggccatgatcatcgatctcggcgacgcagccgacctgaccctgggcggcgactccgactcctccgagaacaagcagagcccgtacagccac

SEQ ID NO: 2458 - protein, 85 aa, Streptomyces sp.
MGVPRGYRQLLFRGRWLACTGDVGTPPGRTAEHEEGPVSHPTSTPLTGITTTGEAAMIIDLGDAADLTLGGDSDSSENKQSPYSH

SEQ ID NO: 2459 - DNA, 138 bp, Streptomyces sp.
  CDS (1)..(138)
atggacatcgagatcgagggcaccgagaccgggaccgcgtacgtggcgccggccgtggacgacctgggcgacgtcaccgaggtcaccctcgggtcgggcggcttcaacaaccccgactccaccatgtactggcagggc

SEQ ID NO: 2460 - protein, 46 aa, Streptomyces sp.
MDIEIEGTETGTAYVAPAVDDLGDVTEVTLGSGGFNNPDSTMYWQG

SEQ ID NO: 2461 - DNA, 171 bp, Streptomyces peucetius
  CDS (1)..(171)
atgaccgagcagaccaccgccatcccccagcccgccgtcgcggacacctccggccaggcgccgcgtaccggcggcttcgcgccgcaggtcgacacccacccggtgggcgccttcaccctggggcgccagaacgccaacgactcggacaagtcgaactacttcgaagcctcc

SEQ ID NO: 2462 - protein, 57 aa, Streptomyces peucetius
MTEQTTAIPQPAVADTSGQAPRTGGFAPQVDTHPVGAFTLGRQNANDSDKSNYFEAS

SEQ ID NO: 2463 - DNA, 129 bp, Streptomyces sp.; identical to SEQ ID NO: 1763
  CDS (1)..(129)

SEQ ID NO: 2464 - protein, 43 aa, Streptomyces sp.; identical to SEQ ID NO: 1764

SEQ ID NO: 2465 - DNA, 150 bp, Streptomyces sp.
  CDS (1)..(150)
atggagaacgtgccggagaacggggccgatcgggcagagcgcggccgagcggtcgaggagccggtgttgctggtcagtctcggcgaggtgtccgcggcgacccagggcctaggcatgggccactcggaggacaagcggcgggcctacaac

SEQ ID NO: 2466 - protein, 50 aa, Streptomyces sp.
MENVPENGADRAERGRAVEEPVLLVSLGEVSAATQGLGMGHSEDKRRAYN

SEQ ID NO: 2467 - DNA, 138 bp, Roseobacter denitrificans
  CDS (1)..(138)
atgactaaagctgtatacgaagcgcctgtactgcgctcgcatggcaaagttgaggccgtaacaaaaggtggttccacaggttccagccttgacgcggcattcccagctggcacgccattcacagacttgacactgtcc

SEQ ID NO: 2468 - protein, 46 aa, Roseobacter denitrificans
MTKAVYEAPVLRSHGKVEAVTKGGSTGSSLDAAFPAGTPFTDLTLS

SEQ ID NO: 2469 - DNA, 141 bp, Frankia sp.; identical to SEQ ID NO: 869
  CDS (1)..(141)

SEQ ID NO: 2470 - protein, 47 aa, Frankia sp.; identical to SEQ ID NO: 870

SEQ ID NO: 2471 - DNA, 141 bp, Novosphingobium sp.; identical to SEQ ID NO: 2437
  CDS (1)..(141)

SEQ ID NO: 2472 - protein, 47 aa, Novosphingobium sp.; identical to SEQ ID NO: 2438

SEQ ID NO: 2473 - DNA, 165 bp, Streptomyces clavuligerus
  CDS (1)..(165)
atgtccatcagtccttccgcacagtcggccgagcccggggtggaggtctcccccgccctcgtcttcggcctgccggccggcttcagcgccgaggagtccacgctggggcagcagaacttcaacgacgccgacaccggtggcaccaattacttcgagagcgccagc

SEQ ID NO: 2474 - protein, 55 aa, Streptomyces clavuligerus
MSISPSAQSAEPGVEVSPALVFGLPAGFSAEESTLGQQNFNDADTGGTNYFESAS

SEQ ID NO: 2475 - DNA, 141 bp, Herbidospora cretacea
  CDS (1)..(141)
atgtcagcagaggggcccgaactgccgtcgccggagaccgactatgagccgcccaccctcatccgcctcggccgggtcaccgaactgttcggcggaaactccagcagcggaaacgccgacgcgaattccgactattactgg

SEQ ID NO: 2476 - protein, 47 aa, Herbidospora cretacea
MSAEGPELPSPETDYEPPTLIRLGRVTELFGGNSSSGNADANSDYYW

SEQ ID NO: 2477 - DNA, 126 bp, Propionibacterium acidifaciens; identical to SEQ ID NO: 1279
  CDS (1)..(126)

SEQ ID NO: 2478 - protein, 42 aa, Propionibacterium acidifaciens; identical to SEQ ID NO: 1280

SEQ ID NO: 2479 - DNA, 141 bp, Frankia sp.; identical to SEQ ID NO: 869
  CDS (1)..(141)

SEQ ID NO: 2480 - protein, 47 aa, Frankia sp.; identical to SEQ ID NO: 870

SEQ ID NO: 2481 - DNA, 120 bp, Lactococcus garvieae; identical to SEQ ID NO: 1549
  CDS (1)..(120)

SEQ ID NO: 2482 - protein, 40 aa, Lactococcus garvieae; identical to SEQ ID NO: 1550

SEQ ID NO: 2483 - DNA, 126 bp, Lactococcus garvieae; identical to SEQ ID NO: 1551
  CDS (1)..(126)

SEQ ID NO: 2484 - protein, 42 aa, Lactococcus garvieae; identical to SEQ ID NO: 1552

SEQ ID NO: 2485 - DNA, 138 bp, Jiangella alkaliphila
  CDS (1)..(138)
atggcagaccgcgaccactacccgggctcggcggaacaagacagcaacccggacgctgcgatcgctctcggcgatgcaaccgccctgacgaagggcggagcggagaagagcatcgaggccaaacaacgcccgtacgac

SEQ ID NO: 2486 - protein, 46 aa, Jiangella alkaliphila
MADRDHYPGSAEQDSNPDAAIALGDATALTKGGAEKSIEAKQRPYD

SEQ ID NO: 2487 - DNA, 132 bp, Acinetobacter gyllenbergii
  CDS (1)..(132)
atgttcaaaaaagagcagaaatatcataaacaattgaaagttatttctgttaaaggaagtgcttcaaaaatgacgctaggaggaaaaggtccaatttttgagacttgggtaacagaaggaaactactacggc

SEQ ID NO: 2488 - protein, 44 aa, Acinetobacter gyllenbergii
MFKKEQKYHKQLKVISVKGSASKMTLGGKGPIFETWVTEGNYYG

SEQ ID NO: 2489 - DNA, 171 bp, Achromobacter sp.
  CDS (1)..(171)
atgcagaccacacgtccaatccaatccgattccgaaatccaaatcctgagtatcgcaactcctgcgaccaaattaacccaaggcggtggcggccccacgcccgaatatttcctcatgcctattgacccagcatggttgcaagccaatctcccaaacaccggcaaatataac

SEQ ID NO: 2490 - protein, 57 aa, Achromobacter sp.
MQTTRPIQSDSEIQILSIATPATKLTQGGGGPTPEYFLMPIDPAWLQANLPNTGKYN

SEQ ID NO: 2491 - DNA, 150 bp, Mesorhizobium ciceri; identical to SEQ ID NO: 841
  CDS (1)..(150)

SEQ ID NO: 2492 - protein, 50 aa, Mesorhizobium ciceri; identical to SEQ ID NO: 842

SEQ ID NO: 2493 - DNA, 96 bp, Actinomyces israelii
  CDS (1)..(96)
atggtggtgctcggagacttctccgacgtcactcggtgcctgtggtggggggattgtcgggattttctcggctgcggactcgttcccatctgcatc

SEQ ID NO: 2494 - protein, 32 aa, Actinomyces israelii
MVVLGDFSDVTRCLWWGDCRDFLGCGLVPICI

SEQ ID NO: 2495 - DNA, 132 bp, Streptomyces sp.
  CDS (1)..(132)
atggatcacaagcacaccacggacacgcccgaagagttcgacgttccgccggtcatcattctgggcaacgctgccacgctgacgcggggcggtgaaaactcgggagtcgaggcgaaacagacgccgtacgac

SEQ ID NO: 2496 - protein, 44 aa, Streptomyces sp.
MDHKHTTDTPEEFDVPPVIILGNAATLTRGGENSGVEAKQTPYD

SEQ ID NO: 2497 - DNA, 120 bp, Lactococcus garvieae; identical to SEQ ID NO: 1549
  CDS (1)..(120)

SEQ ID NO: 2498 - protein, 40 aa, Lactococcus garvieae; identical to SEQ ID NO: 1550

SEQ ID NO: 2499 - DNA, 126 bp, Lactococcus garvieae; identical to SEQ ID NO: 1551
  CDS (1)..(126)

SEQ ID NO: 2500 - protein, 42 aa, Lactococcus garvieae; identical to SEQ ID NO: 1552

SEQ ID NO: 2501 - DNA, 144 bp, Thermoactinomyces vulgaris
  CDS (1)..(144)
atggaaaaacaaaaagaaactaaaaaagaatactcatctccaaggttgatcgaactgggcgacattgtagagataacttttggaggaaaacccggctggggtagcgatacctattcccaaagataccctcgtagcgacgaagac

SEQ ID NO: 2502 - protein, 48 aa, Thermoactinomyces vulgaris
MEKQKETKKEYSSPRLIELGDIVEITFGGKPGWGSDTYSQRYPRSDED

SEQ ID NO: 2503 - DNA, 138 bp, Sphingobium yanoikuyae; identical to SEQ ID NO: 941
  CDS (1)..(138)

SEQ ID NO: 2504 - protein, 46 aa, Sphingobium yanoikuyae; identical to SEQ ID NO: 942

SEQ ID NO: 2505 - DNA, 99 bp, Actinokineospora enzanensis
  CDS (1)..(99)
atggagcccatcggcccgttgctggacctcggtgacgccgccgaactgaccctgggggtcggccgctcgaccaacgaggacaagcgctacatctacaac

SEQ ID NO: 2506 - protein, 33 aa, Actinokineospora enzanensis
MEPIGPLLDLGDAAELTLGVGRSTNEDKRYIYN

SEQ ID NO: 2507 - DNA, 162 bp, Mesorhizobium sp.
gtggagagtaaattggaacagaatgttgaaaagcatgagtacgaaacccctagcctgacggtccacggctcgatcgagaccatcacgcaaggcggtagcggtactacggcactcgacgcctcgtttccggcacatacgccggtcggcgaactcaccttctcc

SEQ ID NO: 2508 - protein, 54 aa, Mesorhizobium sp.
MESKLEQNVEKHEYETPSLTVHGSIETITQGGSGTTALDASFPAHTPVGELTFS

SEQ ID NO: 2509 - DNA, 138 bp, Sphingomonas melonis
  CDS (1)..(138)
atgcaacggaagaacgacaagcgggacgtgaagcgcctcgatctcggcggggtcatgcagcagaccaagggcggcgccatgtcggtcaacgacaaccagaacgggcttcgtccgatcttcggcggtctcaccgccgac

SEQ ID NO: 2510 - protein, 46 aa, Sphingomonas melonis
MQRKNDKRDVKRLDLGGVMQQTKGGAMSVNDNQNGLRPIFGGLTAD

SEQ ID NO: 2511 - DNA, 162 bp, Mesorhizobium sp.; identical to SEQ ID NO: 2507

SEQ ID NO: 2512 - protein, 54 aa, Mesorhizobium sp.; identical to SEQ ID NO: 2508

SEQ ID NO: 2513 - DNA, 162 bp, Mesorhizobium sp.; identical to SEQ ID NO: 2507

SEQ ID NO: 2514 - protein, 54 aa, Mesorhizobium sp.; identical to SEQ ID NO: 2508

SEQ ID NO: 2515 - DNA, 162 bp, Mesorhizobium sp.; identical to SEQ ID NO: 2507

SEQ ID NO: 2516 - protein, 54 aa, Mesorhizobium sp.; identical to SEQ ID NO: 2508

SEQ ID NO: 2517 - DNA, 162 bp, Mesorhizobium sp.; identical to SEQ ID NO: 2507

SEQ ID NO: 2518 - protein, 54 aa, Mesorhizobium sp.; identical to SEQ ID NO: 2508

SEQ ID NO: 2519 - DNA, 162 bp, Mesorhizobium sp.; identical to SEQ ID NO: 2507

SEQ ID NO: 2520 - protein, 54 aa, Mesorhizobium sp.; identical to SEQ ID NO: 2508

SEQ ID NO: 2521 - DNA, 162 bp, Mesorhizobium sp.; identical to SEQ ID NO: 2507

SEQ ID NO: 2522 - protein, 54 aa, Mesorhizobium sp.; identical to SEQ ID NO: 2508

SEQ ID NO: 2523 - DNA, 162 bp, Mesorhizobium sp.; identical to SEQ ID NO: 2507

SEQ ID NO: 2524 - protein, 54 aa, Mesorhizobium sp.; identical to SEQ ID NO: 2508

SEQ ID NO: 2525 - DNA, 141 bp, Frankia sp.; identical to SEQ ID NO: 869
  CDS (1)..(141)

SEQ ID NO: 2526 - protein, 47 aa, Frankia sp.; identical to SEQ ID NO: 870

SEQ ID NO: 2527 - DNA, 162 bp, Mesorhizobium sp.; identical to SEQ ID NO: 2507

SEQ ID NO: 2528 - protein, 54 aa, Mesorhizobium sp.; identical to SEQ ID NO: 2508

SEQ ID NO: 2529 - DNA, 150 bp, Mesorhizobium ciceri; identical to SEQ ID NO: 841
  CDS (1)..(150)

SEQ ID NO: 2530 - protein, 50 aa, Mesorhizobium ciceri; identical to SEQ ID NO: 842

SEQ ID NO: 2531 - DNA, 150 bp, Mesorhizobium ciceri; identical to SEQ ID NO: 841
  CDS (1)..(150)

SEQ ID NO: 2532 - protein, 50 aa, Mesorhizobium ciceri; identical to SEQ ID NO: 842

SEQ ID NO: 2533 - DNA, 117 bp, Nocardiopsis salina
  CDS (1)..(117)
atggcttctccctcggccgtggagtccgaggagatggttgtcgatctgggtgacgcagccgacctgaccctcggtgagggccagtcggaaaacgaggacaagcgcaagatctacaac

SEQ ID NO: 2534 - protein, 39 aa, Nocardiopsis salina
MASPSAVESEEMVVDLGDAADLTLGEGQSENEDKRKIYN

SEQ ID NO: 2535 - DNA, 156 bp, Pseudonocardia acaciae; identical to SEQ ID NO: 873
  CDS (1)..(156)

SEQ ID NO: 2536 - protein, 52 aa, Pseudonocardia acaciae; identical to SEQ ID NO: 874

SEQ ID NO: 2537 - DNA, 195 bp, Pseudonocardia acaciae; identical to SEQ ID NO: 875

SEQ ID NO: 2538 - protein, 65 aa, Pseudonocardia acaciae; identical to SEQ ID NO: 876

SEQ ID NO: 2539 - DNA, 159 bp, Pseudonocardia acaciae; identical to SEQ ID NO: 877
  CDS (1)..(159)

SEQ ID NO: 2540 - protein, 53 aa, Pseudonocardia acaciae; identical to SEQ ID NO: 878

SEQ ID NO: 2541 - DNA, 162 bp, Mesorhizobium sp.; identical to SEQ ID NO: 2507

SEQ ID NO: 2542 - protein, 54 aa, Mesorhizobium sp.; identical to SEQ ID NO: 2508

SEQ ID NO: 2543 - DNA, 138 bp, Thioclava indica
  CDS (1)..(138)
atgcaaaagaaaacttacgctacgccgactttgcgtcaacacggtaagcttgaggacatgacacatggccagagcaccggatcggaactggatcatatgttcccggatggcactccgttcagccatctgaccttttcc

SEQ ID NO: 2544 - protein, 46 aa, Thioclava indica
MQKKTYATPTLRQHGKLEDMTHGQSTGSELDHMFPDGTPFSHLTFS

SEQ ID NO: 2545 - DNA, 162 bp, Mesorhizobium sp.; identical to SEQ ID NO: 2507

SEQ ID NO: 2546 - protein, 54 aa, Mesorhizobium sp.; identical to SEQ ID NO: 2508

SEQ ID NO: 2547 - DNA, 162 bp, Mesorhizobium sp.; identical to SEQ ID NO: 2507

SEQ ID NO: 2548 - protein, 54 aa, Mesorhizobium sp.; identical to SEQ ID NO: 2508

SEQ ID NO: 2549 - DNA, 162 bp, Mesorhizobium sp.; identical to SEQ ID NO: 2507

SEQ ID NO: 2550 - protein, 54 aa, Mesorhizobium sp.; identical to SEQ ID NO: 2508

SEQ ID NO: 2551 - DNA, 162 bp, Mesorhizobium sp.; identical to SEQ ID NO: 2507

SEQ ID NO: 2552 - protein, 54 aa, Mesorhizobium sp.; identical to SEQ ID NO: 2508

SEQ ID NO: 2553 - DNA, 111 bp, Thioclava dalianensis
  CDS (1)..(111)
atgctgcagaagcacggtaagcttgaagcccgtacccatggcgcttcgaccggttcgtcgctggacgcggctttcccgtccgggaccgacttcggcgatctcaccttctcg

SEQ ID NO: 2554 - protein, 37 aa, Thioclava dalianensis
MLQKHGKLEARTHGASTGSSLDAAFPSGTDFGDLTFS

SEQ ID NO: 2555 - DNA, 162 bp, Mesorhizobium sp.; identical to SEQ ID NO: 2507

SEQ ID NO: 2556 - protein, 54 aa, Mesorhizobium sp.; identical to SEQ ID NO: 2508

SEQ ID NO: 2557 - DNA, 138 bp, Nonomuraea coxensis; identical to SEQ ID NO: 1819
  CDS (1)..(138)

SEQ ID NO: 2558 - protein, 46 aa, Nonomuraea coxensis; identical to SEQ ID NO: 1820

SEQ ID NO: 2559 - DNA, 87 bp, Streptomyces sp.
  CDS (1)..(87)
atgtccgtcgacctcggcgacgccgccgacctgacgctgggcggcgacaacgactcctccgagaacaagcagagcccgtacagccac

SEQ ID NO: 2560 - protein, 29 aa, Streptomyces sp.
MSVDLGDAADLTLGGDNDSSENKQSPYSH

SEQ ID NO: 2561 - DNA, 162 bp, Mesorhizobium sp.; identical to SEQ ID NO: 2507

SEQ ID NO: 2562 - protein, 54 aa, Mesorhizobium sp.; identical to SEQ ID NO: 2508

SEQ ID NO: 2563 - DNA, 162 bp, Mesorhizobium sp.; identical to SEQ ID NO: 2507

SEQ ID NO: 2564 - protein, 54 aa, Mesorhizobium sp.; identical to SEQ ID NO: 2508

SEQ ID NO: 2565 - DNA, 150 bp, Mesorhizobium ciceri; identical to SEQ ID NO: 841
  CDS (1)..(150)

SEQ ID NO: 2566 - protein, 50 aa, Mesorhizobium ciceri; identical to SEQ ID NO: 842

SEQ ID NO: 2567 - DNA, 162 bp, Mesorhizobium sp.; identical to SEQ ID NO: 2507

SEQ ID NO: 2568 - protein, 54 aa, Mesorhizobium sp.; identical to SEQ ID NO: 2508

SEQ ID NO: 2569 - DNA, 162 bp, Mesorhizobium sp.; identical to SEQ ID NO: 2507

SEQ ID NO: 2570 - protein, 54 aa, Mesorhizobium sp.; identical to SEQ ID NO: 2508

SEQ ID NO: 2571 - DNA, 150 bp, Mesorhizobium sp.
  CDS (1)..(150)
atggaacagaatgttgaaaagcatgagtatgaaacgccaaacctgacggtacatggttcaattgaaaccattacgcagggcggcggtggcagcacggcactcgacgcgtcgtttcccgcgcacaccccgatcggcgacctgactttctcc

SEQ ID NO: 2572 - protein, 50 aa, Mesorhizobium sp.
MEQNVEKHEYETPNLTVHGSIETITQGGGGSTALDASFPAHTPIGDLTFS

SEQ ID NO: 2573 - DNA, 150 bp, Mesorhizobium ciceri; identical to SEQ ID NO: 841
  CDS (1)..(150)

SEQ ID NO: 2574 - protein, 50 aa, Mesorhizobium ciceri; identical to SEQ ID NO: 842

SEQ ID NO: 2575 - DNA, 162 bp, Mesorhizobium sp.; identical to SEQ ID NO: 2507

SEQ ID NO: 2576 - protein, 54 aa, Mesorhizobium sp.; identical to SEQ ID NO: 2508

SEQ ID NO: 2577 - DNA, 150 bp, Mesorhizobium ciceri; identical to SEQ ID NO: 841
  CDS (1)..(150)

SEQ ID NO: 2578 - protein, 50 aa, Mesorhizobium ciceri; identical to SEQ ID NO: 842

SEQ ID NO: 2579 - DNA, 162 bp, Mesorhizobium sp.; identical to SEQ ID NO: 2507

SEQ ID NO: 2580 - protein, 54 aa, Mesorhizobium sp.; identical to SEQ ID NO: 2508

SEQ ID NO: 2581 - DNA, 162 bp, Mesorhizobium sp.; identical to SEQ ID NO: 2507

SEQ ID NO: 2582 - protein, 54 aa, Mesorhizobium sp.; identical to SEQ ID NO: 2508

SEQ ID NO: 2583 - DNA, 150 bp, Mesorhizobium ciceri; identical to SEQ ID NO: 841
  CDS (1)..(150)

SEQ ID NO: 2584 - protein, 50 aa, Mesorhizobium ciceri; identical to SEQ ID NO: 842

SEQ ID NO: 2585 - DNA, 162 bp, Mesorhizobium sp.; identical to SEQ ID NO: 2507

SEQ ID NO: 2586 - protein, 54 aa, Mesorhizobium sp.; identical to SEQ ID NO: 2508

SEQ ID NO: 2587 - DNA, 150 bp, Mesorhizobium ciceri; identical to SEQ ID NO: 841
  CDS (1)..(150)

SEQ ID NO: 2588 - protein, 50 aa, Mesorhizobium ciceri; identical to SEQ ID NO: 842

SEQ ID NO: 2589 - DNA, 150 bp, Mesorhizobium sp.; identical to SEQ ID NO: 2231
  CDS (1)..(150)

SEQ ID NO: 2590 - protein, 50 aa, Mesorhizobium sp.; identical to SEQ ID NO: 2232

SEQ ID NO: 2591 - DNA, 105 bp, Bradyrhizobium sp.
  CDS (1)..(105)
atggtgcaggacctcggggacgctaccgagctcacaaaaggctttgggggctcgtggcgcgcagaacacaccacgggcgattattattacatggatgattccgat

SEQ ID NO: 2592 - protein, 35 aa, Bradyrhizobium sp.
MVQDLGDATELTKGFGGSWRAEHTTGDYYYMDDSD

SEQ ID NO: 2593 - DNA, 150 bp, Mesorhizobium ciceri; identical to SEQ ID NO: 841
  CDS (1)..(150)

SEQ ID NO: 2594 - protein, 50 aa, Mesorhizobium ciceri; identical to SEQ ID NO: 842

SEQ ID NO: 2595 - DNA, 150 bp, Mesorhizobium ciceri; identical to SEQ ID NO: 841
  CDS (1)..(150)

SEQ ID NO: 2596 - protein, 50 aa, Mesorhizobium ciceri; identical to SEQ ID NO: 842

SEQ ID NO: 2597 - DNA, 150 bp, Mesorhizobium sp.
  CDS (1)..(150)
atggaacagaatgttgaaaggcgtgaatatgaaacgccaagcctgacggtccatggttcgatcgaaaccatcacccagggcggcggcggcaacacggcgaccgacgcatcgtttcccgcgcatacgccgattggcgacctaacattttcc

SEQ ID NO: 2598 - protein, 50 aa, Mesorhizobium sp.
MEQNVERREYETPSLTVHGSIETITQGGGGNTATDASFPAHTPIGDLTFS

SEQ ID NO: 2599 - DNA, 132 bp, Klebsiella pneumoniae
  CDS (1)..(132)
atgcaacagaaaaaaaatgaccagaaaaaagtgactcttaaaaaactcaataagaaagccagtaaagtaacgcgtggatctgatggcccaatcattgagttctttaatccaaatggagttatgcattacggc

SEQ ID NO: 2600 - protein, 44 aa, Klebsiella pneumoniae
MQQKKNDQKKVTLKKLNKKASKVTRGSDGPIIEFFNPNGVMHYG

SEQ ID NO: 2601 - DNA, 144 bp, Bradyrhizobium sp.
  CDS (1)..(144)
atgaatacgaccgctatcaatgaaaccgctatcaatgacacggtgcaggacctcggggacgccaccgagctcacaaaaggctttgggggctcgtggcgcgcagaacacacgaccggcgattattattacgtggatgagtccgat

SEQ ID NO: 2602 - protein, 48 aa, Bradyrhizobium sp.
MNTTAINETAINDTVQDLGDATELTKGFGGSWRAEHTTGDYYYVDESD

SEQ ID NO: 2603 - DNA, 150 bp, Mesorhizobium australicum
  CDS (1)..(150)
atggaacagaatgttgaaaagcatgagtacgaaacgccaaacctgacagtacatggttcaatcgaaaccattacccaaggcggtggtggcagcacggcaatcgacgcgtcgtttcccgcgcacaccccgattggcgacctgacgttctcc

SEQ ID NO: 2604 - protein, 50 aa, Mesorhizobium australicum
MEQNVEKHEYETPNLTVHGSIETITQGGGGSTAIDASFPAHTPIGDLTFS

SEQ ID NO: 2605 - DNA, 150 bp, Mesorhizobium australicum; identical to SEQ ID NO: 2603
  CDS (1)..(150)

SEQ ID NO: 2606 - protein, 50 aa, Mesorhizobium australicum; identical to SEQ ID NO: 2604

SEQ ID NO: 2607 - DNA, 150 bp, Mesorhizobium australicum; identical to SEQ ID NO: 2603
  CDS (1)..(150)

SEQ ID NO: 2608 - protein, 50 aa, Mesorhizobium australicum; identical to SEQ ID NO: 2604

SEQ ID NO: 2609 - DNA, 132 bp, Klebsiella pneumoniae; identical to SEQ ID NO: 2599
  CDS (1)..(132)

SEQ ID NO: 2610 - protein, 44 aa, Klebsiella pneumoniae; identical to SEQ ID NO: 2600

SEQ ID NO: 2611 - DNA, 138 bp, Roseobacter litoralis
  CDS (1)..(138)
atgactaaagctgtatacgaagcgcctgtactgcgctcgcatggcaaagttgaagctgtaacaaaaggtggttccacaggttcctcccttgacgcagcgttcccagctggcacgccattcgcagacttgacactgtcc

SEQ ID NO: 2612 - protein, 46 aa, Roseobacter litoralis
MTKAVYEAPVLRSHGKVEAVTKGGSTGSSLDAAFPAGTPFADLTLS

SEQ ID NO: 2613 - DNA, 129 bp, Bradyrhizobium sp.
  CDS (1)..(129)
atgaatacaaccgctatcaatgacacggtgctggacctcggggacgccaccgagctcacggaaggccttgggggcgcgtcccgcgccgagcccgcgacgggcgattattatttggagggtgattgcgat

SEQ ID NO: 2614 - protein, 43 aa, Bradyrhizobium sp.
MNTTAINDTVLDLGDATELTEGLGGASRAEPATGDYYLEGDCD

SEQ ID NO: 2615 - DNA, 150 bp, Mesorhizobium australicum; identical to SEQ ID NO: 2603
  CDS (1)..(150)

SEQ ID NO: 2616 - protein, 50 aa, Mesorhizobium australicum; identical to SEQ ID NO: 2604

SEQ ID NO: 2617 - DNA, 153 bp, Fischerella muscicola
  CDS (1)..(153)
atgaagaatcaatccctggagaaagctaaaaattctataccgtcctaccggacgccccaactattagttgctgggacagcagtcgagttagttcgtaacgacattggaggacacctcaaggatggcactggtggctggtgggtttggggttcc

SEQ ID NO: 2618 - protein, 51 aa, Fischerella muscicola
MKNQSLEKAKNSIPSYRTPQLLVAGTAVELVRNDIGGHLKDGTGGWWVWGS

SEQ ID NO: 2619 - DNA, 111 bp, Klebsiella variicola; identical to SEQ ID NO: 833
  CDS (1)..(111)

SEQ ID NO: 2620 - protein, 37 aa, Klebsiella variicola; identical to SEQ ID NO: 834

SEQ ID NO: 2621 - DNA, 150 bp, Mesorhizobium sp.
  CDS (1)..(150)
atggaacagaatgttgaaaagcatgagtacgaaacccccagcctgacggttcacggttcgattgaaacgatcacgcagggcggtgctggcgtcacggcgctcgacgcgagctttcccgcgcacacgccggtcggcgagctgaccttctct

SEQ ID NO: 2622 - protein, 50 aa, Mesorhizobium sp.
MEQNVEKHEYETPSLTVHGSIETITQGGAGVTALDASFPAHTPVGELTFS

SEQ ID NO: 2623 - DNA, 111 bp, Klebsiella variicola; identical to SEQ ID NO: 833
  CDS (1)..(111)

SEQ ID NO: 2624 - protein, 37 aa, Klebsiella variicola; identical to SEQ ID NO: 834

SEQ ID NO: 2625 - DNA, 126 bp, Paenibacillus polymyxa; identical to SEQ ID NO: 829
  CDS (1)..(126)

SEQ ID NO: 2626 - protein, 42 aa, Paenibacillus polymyxa; identical to SEQ ID NO: 830

SEQ ID NO: 2627 - DNA, 126 bp, Paenibacillus polymyxa; identical to SEQ ID NO: 829
  CDS (1)..(126)

SEQ ID NO: 2628 - protein, 42 aa, Paenibacillus polymyxa; identical to SEQ ID NO: 830

SEQ ID NO: 2629 - DNA, 126 bp, Paenibacillus polymyxa; identical to SEQ ID NO: 829
  CDS (1)..(126)

SEQ ID NO: 2630 - protein, 42 aa, Paenibacillus polymyxa; identical to SEQ ID NO: 830

SEQ ID NO: 2631 - protein, 21 aa, Artificial Sequence
  lasso core peptide of microcin J25 (MccJ25)
GGAGHVPEYFVGIGTPISFYG

SEQ ID NO: 2632 - protein, 18 aa, Artificial Sequence
  lasso core peptide of ukn22
WYTAEWGLELIFVFPRFI

SEQ ID NO: 2633 - protein, 19 aa, Artificial Sequence
  lasso core peptide of capistruin
GTPGFQTPDARVISRFGFN

SEQ ID NO: 2634 - protein, 20 aa, Artificial Sequence
  lasso core peptide of lariatin
GSQLVYREWVGHSNVIKPGP

SEQ ID NO: 2635 - protein, 22 aa, Artificial Sequence
  lasso core peptide of ukn16
GVWFGNYVDVGGAKAPFPWGSN

SEQ ID NO: 2636 - protein, 16 aa, Artificial Sequence
  lasso core peptide of adanomysin
GSSTSGTADANSQYYW

SEQ ID NO: 2637 - protein, 22 aa, Artificial Sequence
  lasso leader peptide of ukn22
MEKKKYTAPQLAKVGEFKEATG

SEQ ID NO: 2638 - protein, 18 aa, Artificial Sequence
  lasso core peptide of ukn22 W1Y
YYTAEWGLELIFVFPRFI

SEQ ID NO: 2639 - protein, 18 aa, Artificial Sequence
  lasso core peptide of ukn22 W1F
FYTAEWGLELIFVFPRFI

SEQ ID NO: 2640 - protein, 18 aa, Artificial Sequence
  lasso core peptide of ukn22 W1H
HYTAEWGLELIFVFPRFI

SEQ ID NO: 2641 - protein, 18 aa, Artificial Sequence
  lasso core peptide of ukn22 W1L
LYTAEWGLELIFVFPRFI

SEQ ID NO: 2642 - protein, 18 aa, Artificial Sequence
  lasso core peptide of ukn22 W1A
AYTAEWGLELIFVFPRFI

SEQ ID NO: 2643 - protein, 17 aa, Artificial Sequence
  lasso core peptide of burhizin
GGAGQYKEVEAGRWSDR

SEQ ID NO: 2644 - DNA, 135 bp, Thermobifida cellulosilytica
  cellulonodin precursor peptide coding sequence
atgcaggaaaagaagacccagcgcaagaagtacacccggccgcagatcgccaaggcgggcggtttcaaggagtccacgggctggattcaggggaaatggggcctggagatctacctcatcttcccgcgctacctg

SEQ ID NO: 2645 - protein, 45 aa, Thermobifida cellulosilytica
  cellulonodin precursor peptide
MQEKKTQRKKYTRPQIAKAGGFKESTGWIQGKWGLEIYLIFPRYL

SEQ ID NO: 2646 - DNA, 414 bp, Thermobifida cellulosilytica
  lasso peptidase coding sequence
gtgagcgagtacgtggtgctgcaacgcagcgacgtgcggctctccctgggacagcggtgggcggcgcgctgcgcggtggggctggcccggctgctggcccgccgctcccccgagcgcatccgcgccaccctgcggcggctgcggggcacggtgcgccccgcgacctacccggaggccaaggcggcccgcgacgcggtgctggcggtcagcctgcgctgcgccggcctggaggcgtgcctgcaacggtccctggcggtggcgctgctgtgccggatgcgcggcacctgggccacgtggtgcgtgggggtgccccggcgtccgccgttcgccgggcacgcctgggtggaggccgaggggcgcctggtcgaggagggcgtcgactacgactacttcagccgcctgatcaccgtcgac

SEQ ID NO: 2647 - protein, 138 aa, Thermobifida cellulosilytica
  lasso peptidase
MSEYVVLQRSDVRLSLGQRWAARCAVGLARLLARRSPERIRATLRRLRGTVRPATYPEAKAARDAVLAVSLRCAGLEACLQRSLAVALLCRMRGTWATWCVGVPRRPPFAGHAWVEAEGRLVEEGVDYDYFSRLITVD

SEQ ID NO: 2648 - DNA, 1830 bp, Thermobifida cellulosilytica
  lasso cyclase coding sequence
gtggtcggccgcaccagtccctacttcgctgttctccctgatgtcggtgctcttgggagtgcggccgaccaccttccggaacaccaccggcgggccgcgcacccctcggggcggccctggatcgtgggcgagctcccggacgaccagttcctgctggtcgagtcggggcagcggcgtctcgccgtgatcggacgctgtgctgcgagcccggaccggctgcgtgccgagctcgaccggctcgacgacgtgtccgggctcgaccggctcgcccgcgccctgcccggcagcttccacctcgtcgcggtggcgggcggccggatacgcgtgcagggcagcgcctccgggctgcgccgggtcttccacgccgccgtcggtgcggcccggatcgccgcggaccgctccgacgtcctggccgacctgctgggggtctcccccgccccggacgtcctcgcgctgcggatgttccacggcctgccgtacccgctcaacgaggcgtccgtgtggcccggcgtcgaaccggtccccgctgggcactacctcgacctcgacctgcacggcggcggccaccgggtggtccggtggtggcgtccccccgaggccgagctggacgtggccgccggggctcccctgctgcgcgaggccctggccgaggcggtggacgcgcgcacccgcggcggcggagtggtcagcgccgacctgtccggcggcctggactccaccccgctgtgcgcgctggcctcccgcggctcggcgaaggtcgtcgccctgaccctccacagcgacctggacaccgacgacgacctgcgctgggcgcggatcgcccggcgctccttcccgtcggtggagcacgtggtgttctcctcccacgacctgcccggcttctacgccggactggacggggagctgcccctgctggacgagccgtcggtggccgtgatgagcgccccgcgcgtgctgagcaggctgcggatggcccaggagcacggctcccgcctgcacatggacggcctgggcggcgaccagatgctgagcggcaccccctccctctaccacgacctgctgcgcagccgaccgctgaccgcgctgccgctggtgcgcggccaccgcctgctgctcggcctgtccctggcgacgaccgtcgcctccctcgccgaccgccgcgacctgcgcgcctggttcgccgccacccggcgctgcgtggccaccggggaggagccccgcaacgccgacttcggctgggacgtgctgccccactgcggcccgtggctgaccgccgaggcccgggagcgcgtgctggcccgcttcgacgcggcggcggagtccctggagccgctggcccccacccggggcaggcacgccgacctggcctcgatccgctccgcgggccgggacctgcggctgatccaccaggtcggcgggatcggcctgcccagcgcggagtcgcccttcctcgacgaccgcgtcatggaggcctgcctgcgggtgcgccacgagggccggacgaccccgttcgagttcaaacccctcatgaaggcggccatggccggggtgctcccggaggagttcctgcaacgccggtccaagaccgacgggaccacgctcgccgcggagggcttcgcccggcagcgcgaccggctcgtccagatatggcgggagtcacgactggccgaactgggcctggtcgatccggagccgctggtggagcggctcatgcagccgtactcgcaccgcggaccggactgggggatggaactgaccctcaccgtcgagttgtggctgcgttcccgcgaacgcgtcctacagggagcaaacggtggagacaacaggagc

SEQ ID NO: 2649 - protein, 610 aa, Thermobifida cellulosilytica
  lasso cyclase
MVGRTSPYFAVLPDVGALGSAADHLPEHHRRAAHPSGRPWIVGELPDDQFLLVESGQRRLAVIGRCAASPDRLRAELDRLDDVSGLDRLARALPGSFHLVAVAGGRIRVQGSASGLRRVFHAAVGAARIAADRSDVLADLLGVSPAPDVLALRMFHGLPYPLNEASVWPGVEPVPAGHYLDLDLHGGGHRVVRWWRPPEAELDVAAGAPLLREALAEAVDARTRGGGVVSADLSGGLDSTPLCALASRGSAKVVALTLHSDLDTDDDLRWARIARRSFPSVEHVVFSSHDLPGFYAGLDGELPLLDEPSVAVMSAPRVLSRLRMAQEHGSRLHMDGLGGDQMLSGTPSLYHDLLRSRPLTALPLVRGHRLLLGLSLATTVASLADRRDLRAWFAATRRCVATGEEPRNADFGWDVLPHCGPWLTAEARERVLARFDAAAESLEPLAPTRGRHADLASIRSAGRDLRLIHQVGGIGLPSAESPFLDDRVMEACLRVRHEGRTTPFEFKPLMKAAMAGVLPEEFLQRRSKTDGTTLAAEGFARQRDRLVQIWRESRLAELGLVDPEPLVERLMQPYSHRGPDWGMELTLTVELWLRSRERVLQGANGGDNRS

SEQ ID NO: 2650 - DNA, 270 bp, Thermobifida cellulosilytica
  RRE coding sequence
gtggagacaacaggagctgagttccggctgcggccggacgtctcgatggccgagaccgactacggcctggtgctgctggacggccgcaacggcgagtactggcagctcaacgacaccgcggcgcagatcgtccagcggctgctcgacgggcactcgcccgacgaggtcgtccggttcctggtcagcgagtacgaagtcacctccgcggacgccgaacgcgacgtggccgagctcgtcgccggcatgctggagagcgggatggtgacgcgg

SEQ ID NO: 2651 - protein, 90 aa, Thermobifida cellulosilytica
  RRE
METTGAEFRLRPDVSMAETDYGLVLLDGRNGEYWQLNDTAAQIVQRLLDGHSPDEVVRFLVSEYEVTSADAERDVAELVAGMLESGMVTR

SEQ ID NO: 2652 - protein, 18 aa, Artificial Sequence
  Cellulonodin Core peptide
WIQGKWGLEIYLIFPRYL
